(19) United States
(12) Patent Application Publication
(10) Pub. No.: US 2025/0276095 A1
(43) Pub. Date: Sep. 4, 2025

(54) ADENO-ASSOCIATED VIRUS COMPOSITIONS FOR THE TREATMENT OF DUCHENNE MUSCULAR DYSTROPHY

(71) Applicant: KATE THERAPEUTICS, INC., San Diego, CA (US)

(72) Inventors: Aboozar MONAVARFESHANI, San Diego, CA (US); Saurav SESHADRI, San Diego, CA (US); Mohammadsharif TABEBORDBAR, San Diego, CA (US); Shayan TABEBORDBAR, San Diego, CA (US); Danielle VELEZ, San Diego, CA (US); Simon YE, San Diego, CA (US)

(21) Appl. No.: 19/069,995

(22) Filed: Mar. 4, 2025

Related U.S. Application Data
(60) Provisional application No. 63/561,130, filed on Mar. 4, 2024.
(60) Provisional application No. 63/666,899, filed on Jul. 2, 2024.
(60) Provisional application No. 63/676,780, filed on Jul. 29, 2024.
(60) Provisional application No. 63/688,024, filed on Aug. 28, 2024.

(51) Int. Cl. A61K 48/00; A61P 21/00; C07K 14/005; C07K 14/47; C12N 15/86

(52) U.S. Cl. CPC A61K 48/0058; A61P 21/00; C07K 14/005; C07K 14/4708; C12N 15/86; C12N 2750/14122; C12N 2750/14143; C12N 2830/008; C12N 2830/42; C12N 2830/50

(57) ABSTRACT

The present invention provides novel gene therapy compositions for use in treatment of Duchenne Muscular Dystrophy (DMD).

### CLAIM OF PRIORITY

[0001] This application claims the benefit of U.S. Provisional Patent Application No. 63/561,130, filed Mar. 4, 2024; U.S. Provisional Patent Application No. 63/666,899, filed Jul. 2, 2024; U.S. Provisional Patent Application No. 63/676,780, filed Jul. 29, 2024; and U.S. Provisional Patent Application No. 63/688,024, filed Aug. 28, 2024; each of which is incorporated by reference herein in its entirety.

### SEQUENCE LISTING

[0002] This instant application contains a Sequence Listing which has been submitted electronically in XML file format and is hereby incorporated by reference in its entirety. The XML copy, created on Mar. 3, 2025, is named PAT059900-US-NP_SL.xml and is 2,260,685 bytes in size.

### FIELD OF DISCLOSURE

[0003] This disclosure relates to compositions for the treatment of Duchenne Muscular Dystrophy (DMD).

### BACKGROUND

[0004] Duchenne muscular dystrophy (DMD) is a severe type of muscular dystrophy, a group of rare genetic neuromuscular diseases, affecting approximately one in 3,600 to 9,200 live male births. DMD is the most common type of muscular dystrophy predominantly affecting men.

[0005] DMD causes progressive muscle weakness due to muscle fiber disarray, replacement with connective tissue or fat, and death. Voluntary muscles are affected first, especially those of the hips, pelvic area, thighs, calves, eventually progressing to the shoulders and neck, followed by arms, respiratory muscles, and other areas. Symptoms usually appear before age five, expressing as difficulty with motor skills including walking. As a result, falls may be frequent with walking becoming increasingly difficult and frequently impossible before age 13. Most men affected with DMD become essentially paralyzed from the neck down by the age of 21. Cardiomyopathy, particularly dilated cardiomyopathy, is also commonly seen in half of 18-year-olds with DMD. In late stages of the disease, respiratory impairment and swallowing impairment can occur. As a result, median life expectancy for men suffering from DMD is just 28-30 years, however comprehensive care may allow those suffering to live into their 30s or 40s.

[0006] DMD is caused by mutations and/or deletions in any of the 79 exons encoding the large dystrophin protein. While mutations causing DMD can affect any exon, exons 2-20 and 45-55 are common hotspots for large deletion and duplication mutations. The disorder follows an X-linked recessive inheritance pattern, with approximately two-thirds of cases inherited from the mother and one-third resulting from a new mutation.

[0007] Typical therapies for DMD are limited to management strategies, such as physical therapy, braces, and corrective surgery to alleviate symptoms. Assisted ventilation may be required in those with weakness of breathing muscles.

[0008] Gene therapies have been proposed for the treatment of DMD, including delandistrogene moxeparvovec-rokl, marketed under the brand name ELEVIDYS® by Sarepta Therapeutics. However, expression of the microdystrophin protein in skeletal muscles of patients injected with DMD gene therapies has been low and not uniform.

[0009] As a result, there exists a need for improved DMD gene therapies.

### SUMMARY

[0010] The present disclosure is directed to compositions (e.g., adeno-associated viral (AAV) compositions) and methods of use thereof for treating Duchenne Muscular Dystrophy (DMD).

[0011] Accordingly, aspects of the invention provide a formulation comprising an AAV particle comprising (e.g., encapsidating) a nucleic acid comprising a promoter and a sequence encoding microdystrophin.

[0012] Aspects of the invention provide a composition comprising an adeno-associated virus (AAV) particle comprising an engineered capsid protein comprising the amino acid sequence RGDR (SEQ ID NO: 2440). The capsid protein encapsidates a nucleic acid molecule (e.g., a cargo) comprising a promoter, a codon optimized microdystrophin sequence, for example a sequence having at least 95% sequence identity with a sequence selected from SEQ ID NO: 2405-2407. The nucleic acid may further comprise a dorsal root ganglia (DRG) de-targeting miRNA binding site. In aspects of the invention, the nucleic acid molecule may comprise a sequence having the having at least 95% sequence identity with a sequence selected from SEQ ID NO: 2405-2407 that encodes a codon optimized microdystrophin sequence.

[0013] The DRG de-targeting miRNA binding site may comprise a sequence selected from among SEQ ID NOs: 2399-2401.

[0014] The promoter may be a novel promoter that is exhibits specificity (e.g. high expression in) for muscle cells, for example myocytes. The promoter may comprise a sequence having at least 95% sequence identity a sequence selected from among SEQ ID NOs: 2402-2404.

[0015] For example, the nucleic acid molecule (e.g. cargo) may comprise, in order:
[0016] a first inverted terminal repeats (ITR) region;
[0017] a promoter;
[0018] an intron;
[0019] a sequence having at least 95% sequence identity with a sequence selected from any one of SEQ ID NO: 2405-2407;
[0020] a first DRG de-targeting miRNA binding site and preferably, a second DRG de-targeting miRNA binding site;
[0021] a poly-adenylation signal, preferably a shortened poly-adenylation signal; and
[0022] a second ITR region.

[0023] The ITR regions may be AAV2 ITR regions derived from an AAV2.

[0024] For example, the full nucleic acid molecule may comprise a sequence selected from any one of SEQ ID NOs: 2412-2438.

[0025] Advantageously, when administered to a subject with a mutation in the DMD gene that results in low or a lack of dystrophin protein expression, the composition is effective at restoring a healthy phenotype.

[0026] The engineered capsid protein may advantageously exhibit decreased liver tropism and/or increased muscle tropism.

[0027] For example, the capsid protein may comprise an amino acid sequence selected from Tables 1a in hypervariable region IV (HVR IV) relative to wild type AAV9. The capsid protein may comprise substitutions at amino acids 451-455 relative to a wild type AAV9 vector capsid selected from column 1 of Table 1b and a 7-mer insert selected from column 2 of Table 1b inserted after amino acid 455 relative to a wild type AAV9 vector. The capsid protein may further comprise a deletion of G267 relative to wild type AAV9 capsid or equivalent position in another AAV capsid.

[0028] Accordingly, aspects of the invention further provide methods and uses of the compositions of the invention (for example in the preparation of a medicament) for treating a subject suffering from DMD. The methods and uses may comprise providing to a subject a composition of the invention as described above.

[0029] Aspects of the present disclosure provide a recombinant nucleic acid comprising a muscle specific promoter; a sequence encoding microdystrophin; and at least one dorsal root ganglia (DRG) de-targeting miRNA binding site.

[0030] In some embodiments, the muscle specific promoter comprises a CK8 promoter, a desmin promoter, a Mb promoter, a MCK promoter, a MHCK7 promoter, a skeletal muscle alpha actin promoter, or a TTNI2 promoter. In some embodiments, the promoter comprises or consists of a nucleic acid sequence that is at least 85%, at least 86%, at least 87%, at least 88%, at least 89%, at least 90%, at least 91%, at least 92%, at least 93%, at least 94%, at least 95%, at least 96%, at least 97%, at least 98%, or at least 99% identical to the nucleic acid sequence of any one of SEQ ID NOs: 2402-2404. In some embodiments, the promoter comprises or consists of the nucleic acid sequence of any one of SEQ ID NOs: 2402-2404. In some embodiments, the promoter comprises or consists of the nucleic acid sequence of SEQ ID NO: 2402. In some embodiments, the promoter comprises or consists of the nucleic acid sequence of SEQ ID NO: 2403. In some embodiments, the promoter comprises or consists of the nucleic acid sequence of SEQ ID NO: 2404.

[0031] In some embodiments, the sequence encoding microdystrophin is a sequence encoding human microdystrophin. In some embodiments, the sequence encoding microdystrophin encodes a microdystrophin protein comprising or consisting of an amino acid sequence that is at least 85%, at least 86%, at least 87%, at least 88%, at least 89%, at least 90%, at least 91%, at least 92%, at least 93%, at least 94%, at least 95%, at least 96%, at least 97%, at least 98%, or at least 99% identical to SEQ ID NO: 2439. In some embodiments, the sequence encoding microdystrophin encodes a microdystrophin protein comprising or consisting of the amino acid sequence of SEQ ID NO: 2439.

[0032] In some embodiments, the sequence encoding microdystrophin comprises or consists of a codon optimized sequence encoding microdystrophin. In some embodiments, the codon optimized sequence encoding microdystrophin comprises or consists of a nucleic acid sequence that is at least 85%, at least 86%, at least 87%, at least 88%, at least 89%, at least 90%, at least 91%, at least 92%, at least 93%, at least 94%, at least 95%, at least 96%, at least 97%, at least 98%, or at least 99% identical to the nucleic acid sequence of any one of SEQ ID NOs: 2405-2407. In some embodiments, the codon optimized sequence encoding microdystrophin comprises or consists of the nucleic acid sequence of any one of SEQ ID NOs: 2405-2407. In some embodiments, the codon optimized sequence encoding microdystrophin comprises or consists of the nucleic acid sequence of SEQ ID NO: 2405. In some embodiments, the codon optimized sequence encoding microdystrophin comprises or consists of the nucleic acid sequence of SEQ ID NO: 2406. In some embodiments, the codon optimized sequence encoding microdystrophin comprises or consists of the nucleic acid sequence of SEQ ID NO: 2407.

[0033] In some embodiments, the at least one DRG de-targeting miRNA binding site comprises a binding site for miR-338, miR-138, or miR-9. In some embodiments, the at least one DRG de-targeting miRNA binding site comprises a binding site for miR-338-3p, miR-138-5p, or miR-9-5p. In some embodiments, the at least one DRG de-targeting miRNA binding site comprises or consists of a nucleic acid sequence that is at least 85%, at least 86%, at least 87%, at least 88%, at least 89%, at least 90%, at least 91%, at least 92%, at least 93%, at least 94%, at least 95%, at least 96%, at least 97%, at least 98%, or at least 99% identical to the nucleic acid sequence of any one of SEQ ID NOs: 2399-2401. In some embodiments, the at least one DRG de-targeting miRNA binding site comprises or consists of the nucleic acid sequence of any one of SEQ ID NOs: 2399-2401.

[0034] In some embodiments, the at least one DRG de-targeting miRNA binding site comprises a first and a second DRG de-targeting miRNA binding site. In some embodiments, each of the first and the second DRG de-targeting miRNA binding sites comprises or consists of a nucleic acid sequence that is at least 85%, at least 86%, at least 87%, at least 88%, at least 89%, at least 90%, at least 91%, at least 92%, at least 93%, at least 94%, at least 95%, at least 96%, at least 97%, at least 98%, or at least 99% identical to the nucleic acid sequence of any one of SEQ ID NOs: 2399-2401. In some embodiments, each of the first and the second DRG de-targeting miRNA binding sites comprises or consists of the nucleic acid sequence of any one of SEQ ID NOs: 2399-2401. In some embodiments, each of the first and the second DRG de-targeting miRNA binding sites comprises or consists of the nucleic acid sequence of SEQ ID NO: 2399. In some embodiments, each of the first and the second DRG de-targeting miRNA binding sites comprises or consists of the nucleic acid sequence of SEQ ID NO: 2400. In some embodiments, each of the first and the second DRG de-targeting miRNA binding sites comprises or consists of the nucleic acid sequence of SEQ ID NO: 2401.

[0035] In some embodiments, the recombinant nucleic acid comprises, optionally from 5′ to 3′, a promoter comprising or consisting of a nucleic acid sequence that is at least 85%, at least 86%, at least 87%, at least 88%, at least 89%, at least 90%, at least 91%, at least 92%, at least 93%, at least 94%, at least 95%, at least 96%, at least 97%, at least 98%, or at least 99% identical to the nucleic acid sequence of any one of SEQ ID NOs: 2402-2404; a sequence encoding microdystrophin comprising or consisting of a nucleic acid sequence that is at least 85%, at least 86%, at least 87%, at least 88%, at least 89%, at least 90%, at least 91%, at least 92%, at least 93%, at least 94%, at least 95%, at least 96%, at least 97%, at least 98%, or at least 99% identical to the nucleic acid sequence of any one of SEQ ID NOs: 2405-2407; and at least one DRG de-targeting miRNA binding site comprising or consisting of a nucleic acid sequence that is at least 85%, at least 86%, at least 87%, at least 88%, at least 89%, at least 90%, at least 91%, at least 92%, at least 93%, at least 94%, at least 95%, at least 96%, at least 97%, at least 98%, or at least 99% identical to the nucleic acid sequence of any one of SEQ ID NOs: 2399-2401.

[0036] In some embodiments, the recombinant nucleic acid comprises a promoter comprising or consisting of a nucleic acid sequence that is at least 85%, at least 86%, at least 87%, at least 88%, at least 89%, at least 90%, at least 91%, at least 92%, at least 93%, at least 94%, at least 95%, at least 96%, at least 97%, at least 98%, or at least 99% identical to the nucleic acid sequence of SEQ ID NO: 2402; a sequence encoding microdystrophin comprising or consisting of a nucleic acid sequence that is at least 85%, at least 86%, at least 87%, at least 88%, at least 89%, at least 90%, at least 91%, at least 92%, at least 93%, at least 94%, at least 95%, at least 96%, at least 97%, at least 98%, or at least 99% identical to the nucleic acid sequence of SEQ ID NO: 2405; and at least one DRG de-targeting miRNA binding site comprising or consisting of a nucleic acid sequence that is at least 85%, at least 86%, at least 87%, at least 88%, at least 89%, at least 90%, at least 91%, at least 92%, at least 93%, at least 94%, at least 95%, at least 96%, at least 97%, at least 98%, or at least 99% identical to the nucleic acid sequence of SEQ ID NO: 2399.

[0037] In some embodiments, the recombinant nucleic acid comprises a promoter comprising or consisting of a nucleic acid sequence that is at least 85%, at least 86%, at least 87%, at least 88%, at least 89%, at least 90%, at least 91%, at least 92%, at least 93%, at least 94%, at least 95%, at least 96%, at least 97%, at least 98%, or at least 99% identical to the nucleic acid sequence of SEQ ID NO: 2403; a sequence encoding microdystrophin comprising or consisting of a nucleic acid sequence that is at least 85%, at least 86%, at least 87%, at least 88%, at least 89%, at least 90%, at least 91%, at least 92%, at least 93%, at least 94%, at least 95%, at least 96%, at least 97%, at least 98%, or at least 99% identical to the nucleic acid sequence of SEQ ID NO: 2405; and at least one DRG de-targeting miRNA binding site comprising or consisting of a nucleic acid sequence that is at least 85%, at least 86%, at least 87%, at least 88%, at least 89%, at least 90%, at least 91%, at least 92%, at least 93%, at least 94%, at least 95%, at least 96%, at least 97%, at least 98%, or at least 99% identical to the nucleic acid sequence of SEQ ID NO: 2399.

[0038] In some embodiments, the recombinant nucleic acid comprises a promoter comprising or consisting of a nucleic acid sequence that is at least 85%, at least 86%, at least 87%, at least 88%, at least 89%, at least 90%, at least 91%, at least 92%, at least 93%, at least 94%, at least 95%, at least 96%, at least 97%, at least 98%, or at least 99% identical to the nucleic acid sequence of SEQ ID NO: 2404; a sequence encoding microdystrophin comprising or consisting of a nucleic acid sequence that is at least 85%, at least 86%, at least 87%, at least 88%, at least 89%, at least 90%, at least 91%, at least 92%, at least 93%, at least 94%, at least 95%, at least 96%, at least 97%, at least 98%, or at least 99% identical to the nucleic acid sequence of SEQ ID NO: 2405; and at least one DRG de-targeting miRNA binding site comprising or consisting of a nucleic acid sequence that is at least 85%, at least 86%, at least 87%, at least 88%, at least 89%, at least 90%, at least 91%, at least 92%, at least 93%, at least 94%, at least 95%, at least 96%, at least 97%, at least 98%, or at least 99% identical to the nucleic acid sequence of SEQ ID NO: 2399.

[0039] In some embodiments, the recombinant nucleic acid comprises a promoter comprising or consisting of a nucleic acid sequence that is at least 85%, at least 86%, at least 87%, at least 88%, at least 89%, at least 90%, at least 91%, at least 92%, at least 93%, at least 94%, at least 95%, at least 96%, at least 97%, at least 98%, or at least 99% identical to the nucleic acid sequence of SEQ ID NO: 2402; a sequence encoding microdystrophin comprising or consisting of a nucleic acid sequence that is at least 85%, at least 86%, at least 87%, at least 88%, at least 89%, at least 90%, at least 91%, at least 92%, at least 93%, at least 94%, at least 95%, at least 96%, at least 97%, at least 98%, or at least 99% identical to the nucleic acid sequence of SEQ ID NO: 2405; and at least one DRG de-targeting miRNA binding site comprising or consisting of a nucleic acid sequence that is at least 85%, at least 86%, at least 87%, at least 88%, at least 89%, at least 90%, at least 91%, at least 92%, at least 93%, at least 94%, at least 95%, at least 96%, at least 97%, at least 98%, or at least 99% identical to the nucleic acid sequence of SEQ ID NO: 2400.

[0040] In some embodiments, the recombinant nucleic acid comprises a promoter comprising or consisting of a nucleic acid sequence that is at least 85%, at least 86%, at least 87%, at least 88%, at least 89%, at least 90%, at least 91%, at least 92%, at least 93%, at least 94%, at least 95%, at least 96%, at least 97%, at least 98%, or at least 99% identical to the nucleic acid sequence of SEQ ID NO: 2403; a sequence encoding microdystrophin comprising or consisting of a nucleic acid sequence that is at least 85%, at least 86%, at least 87%, at least 88%, at least 89%, at least 90%, at least 91%, at least 92%, at least 93%, at least 94%, at least 95%, at least 96%, at least 97%, at least 98%, or at least 99% identical to the nucleic acid sequence of SEQ ID NO: 2405; and at least one DRG de-targeting miRNA binding site comprising or consisting of a nucleic acid sequence that is at least 85%, at least 86%, at least 87%, at least 88%, at least 89%, at least 90%, at least 91%, at least 92%, at least 93%, at least 94%, at least 95%, at least 96%, at least 97%, at least 98%, or at least 99% identical to the nucleic acid sequence of SEQ ID NO: 2400.

[0041] In some embodiments, the recombinant nucleic acid comprises a promoter comprising or consisting of a nucleic acid sequence that is at least 85%, at least 86%, at least 87%, at least 88%, at least 89%, at least 90%, at least 91%, at least 92%, at least 93%, at least 94%, at least 95%, at least 96%, at least 97%, at least 98%, or at least 99% identical to the nucleic acid sequence of SEQ ID NO: 2404; a sequence encoding microdystrophin comprising or consisting of a nucleic acid sequence that is at least 85%, at least 86%, at least 87%, at least 88%, at least 89%, at least 90%, at least 91%, at least 92%, at least 93%, at least 94%, at least 95%, at least 96%, at least 97%, at least 98%, or at least 99% identical to the nucleic acid sequence of SEQ ID NO: 2405; and at least one DRG de-targeting miRNA binding site comprising or consisting of a nucleic acid sequence that is at least 85%, at least 86%, at least 87%, at least 88%, at least 89%, at least 90%, at least 91%, at least 92%, at least 93%, at least 94%, at least 95%, at least 96%, at least 97%, at least 98%, or at least 99% identical to the nucleic acid sequence of SEQ ID NO: 2400.

[0042] In some embodiments, the recombinant nucleic acid comprises a promoter comprising or consisting of a nucleic acid sequence that is at least 85%, at least 86%, at least 87%, at least 88%, at least 89%, at least 90%, at least 91%, at least 92%, at least 93%, at least 94%, at least 95%, at least 96%, at least 97%, at least 98%, or at least 99% identical to the nucleic acid sequence of SEQ ID NO: 2402; a sequence encoding microdystrophin comprising or consisting of a nucleic acid sequence that is at least 85%, at least 86%, at least 87%, at least 88%, at least 89%, at least 90%, at least 91%, at least 92%, at least 93%, at least 94%, at least 95%, at least 96%, at least 97%, at least 98%, or at least 99% identical to the nucleic acid sequence of SEQ ID NO: 2405; and at least one DRG de-targeting miRNA binding site comprising or consisting of a nucleic acid sequence that is at least 85%, at least 86%, at least 87%, at least 88%, at least 89%, at least 90%, at least 91%, at least 92%, at least 93%, at least 94%, at least 95%, at least 96%, at least 97%, at least 98%, or at least 99% identical to the nucleic acid sequence of SEQ ID NO: 2401.

[0043] In some embodiments, the recombinant nucleic acid comprises a promoter comprising or consisting of a nucleic acid sequence that is at least 85%, at least 86%, at least 87%, at least 88%, at least 89%, at least 90%, at least 91%, at least 92%, at least 93%, at least 94%, at least 95%, at least 96%, at least 97%, at least 98%, or at least 99% identical to the nucleic acid sequence of SEQ ID NO: 2403; a sequence encoding microdystrophin comprising or consisting of a nucleic acid sequence that is at least 85%, at least 86%, at least 87%, at least 88%, at least 89%, at least 90%, at least 91%, at least 92%, at least 93%, at least 94%, at least 95%, at least 96%, at least 97%, at least 98%, or at least 99% identical to the nucleic acid sequence of SEQ ID NO: 2405; and at least one DRG de-targeting miRNA binding site comprising or consisting of a nucleic acid sequence that is at least 85%, at least 86%, at least 87%, at least 88%, at least 89%, at least 90%, at least 91%, at least 92%, at least 93%, at least 94%, at least 95%, at least 96%, at least 97%, at least 98%, or at least 99% identical to the nucleic acid sequence of SEQ ID NO: 2401.

[0044] In some embodiments, the recombinant nucleic acid comprises a promoter comprising or consisting of a nucleic acid sequence that is at least 85%, at least 86%, at least 87%, at least 88%, at least 89%, at least 90%, at least 91%, at least 92%, at least 93%, at least 94%, at least 95%, at least 96%, at least 97%, at least 98%, or at least 99% identical to the nucleic acid sequence of SEQ ID NO: 2404; a sequence encoding microdystrophin comprising or consisting of a nucleic acid sequence that is at least 85%, at least 86%, at least 87%, at least 88%, at least 89%, at least 90%, at least 91%, at least 92%, at least 93%, at least 94%, at least 95%, at least 96%, at least 97%, at least 98%, or at least 99% identical to the nucleic acid sequence of SEQ ID NO: 2405; and at least one DRG de-targeting miRNA binding site comprising or consisting of a nucleic acid sequence that is at least 85%, at least 86%, at least 87%, at least 88%, at least 89%, at least 90%, at least 91%, at least 92%, at least 93%, at least 94%, at least 95%, at least 96%, at least 97%, at least 98%, or at least 99% identical to the nucleic acid sequence of SEQ ID NO: 2401.

[0045] In some embodiments, the recombinant nucleic acid comprises a promoter comprising or consisting of a nucleic acid sequence that is at least 85%, at least 86%, at least 87%, at least 88%, at least 89%, at least 90%, at least 91%, at least 92%, at least 93%, at least 94%, at least 95%, at least 96%, at least 97%, at least 98%, or at least 99% identical to the nucleic acid sequence of SEQ ID NO: 2402; a sequence encoding microdystrophin comprising or consisting of a nucleic acid sequence that is at least 85%, at least 86%, at least 87%, at least 88%, at least 89%, at least 90%, at least 91%, at least 92%, at least 93%, at least 94%, at least 95%, at least 96%, at least 97%, at least 98%, or at least 99% identical to the nucleic acid sequence of SEQ ID NO: 2406; and at least one DRG de-targeting miRNA binding site comprising or consisting of a nucleic acid sequence that is at least 85%, at least 86%, at least 87%, at least 88%, at least 89%, at least 90%, at least 91%, at least 92%, at least 93%, at least 94%, at least 95%, at least 96%, at least 97%, at least 98%, or at least 99% identical to the nucleic acid sequence of SEQ ID NO: 2399.

[0046] In some embodiments, the recombinant nucleic acid comprises a promoter comprising or consisting of a nucleic acid sequence that is at least 85%, at least 86%, at least 87%, at least 88%, at least 89%, at least 90%, at least 91%, at least 92%, at least 93%, at least 94%, at least 95%, at least 96%, at least 97%, at least 98%, or at least 99% identical to the nucleic acid sequence of SEQ ID NO: 2403; a sequence encoding microdystrophin comprising or consisting of a nucleic acid sequence that is at least 85%, at least 86%, at least 87%, at least 88%, at least 89%, at least 90%, at least 91%, at least 92%, at least 93%, at least 94%, at least 95%, at least 96%, at least 97%, at least 98%, or at least 99% identical to the nucleic acid sequence of SEQ ID NO: 2406; and at least one DRG de-targeting miRNA binding site comprising or consisting of a nucleic acid sequence that is at least 85%, at least 86%, at least 87%, at least 88%, at least 89%, at least 90%, at least 91%, at least 92%, at least 93%, at least 94%, at least 95%, at least 96%, at least 97%, at least 98%, or at least 99% identical to the nucleic acid sequence of SEQ ID NO: 2399.

[0047] In some embodiments, the recombinant nucleic acid comprises a promoter comprising or consisting of a nucleic acid sequence that is at least 85%, at least 86%, at least 87%, at least 88%, at least 89%, at least 90%, at least 91%, at least 92%, at least 93%, at least 94%, at least 95%, at least 96%, at least 97%, at least 98%, or at least 99% identical to the nucleic acid sequence of SEQ ID NO: 2404; a sequence encoding microdystrophin comprising or consisting of a nucleic acid sequence that is at least 85%, at least 86%, at least 87%, at least 88%, at least 89%, at least 90%, at least 91%, at least 92%, at least 93%, at least 94%, at least 95%, at least 96%, at least 97%, at least 98%, or at least 99% identical to the nucleic acid sequence of SEQ ID NO: 2406; and at least one DRG de-targeting miRNA binding site comprising or consisting of a nucleic acid sequence that is at least 85%, at least 86%, at least 87%, at least 88%, at least 89%, at least 90%, at least 91%, at least 92%, at least 93%, at least 94%, at least 95%, at least 96%, at least 97%, at least 98%, or at least 99% identical to the nucleic acid sequence of SEQ ID NO: 2399.

[0048] In some embodiments, the recombinant nucleic acid comprises a promoter comprising or consisting of a nucleic acid sequence that is at least 85%, at least 86%, at least 87%, at least 88%, at least 89%, at least 90%, at least 91%, at least 92%, at least 93%, at least 94%, at least 95%, at least 96%, at least 97%, at least 98%, or at least 99% identical to the nucleic acid sequence of SEQ ID NO: 2402; a sequence encoding microdystrophin comprising or consisting of a nucleic acid sequence that is at least 85%, at least 86%, at least 87%, at least 88%, at least 89%, at least 90%, at least 91%, at least 92%, at least 93%, at least 94%, at least 95%, at least 96%, at least 97%, at least 98%, or at least 99% identical to the nucleic acid sequence of SEQ ID NO: 2406; and at least one DRG de-targeting miRNA binding site comprising or consisting of a nucleic acid sequence that is at least 85%, at least 86%, at least 87%, at least 88%, at least 89%, at least 90%, at least 91%, at least 92%, at least 93%, at least 94%, at least 95%, at least 96%, at least 97%, at least 98%, or at least 99% identical to the nucleic acid sequence of SEQ ID NO: 2400.

[0049] In some embodiments, the recombinant nucleic acid comprises a promoter comprising or consisting of a nucleic acid sequence that is at least 85%, at least 86%, at least 87%, at least 88%, at least 89%, at least 90%, at least 91%, at least 92%, at least 93%, at least 94%, at least 95%, at least 96%, at least 97%, at least 98%, or at least 99% identical to the nucleic acid sequence of SEQ ID NO: 2403; a sequence encoding microdystrophin comprising or consisting of a nucleic acid sequence that is at least 85%, at least 86%, at least 87%, at least 88%, at least 89%, at least 90%, at least 91%, at least 92%, at least 93%, at least 94%, at least 95%, at least 96%, at least 97%, at least 98%, or at least 99% identical to the nucleic acid sequence of SEQ ID NO: 2406; and at least one DRG de-targeting miRNA binding site comprising or consisting of a nucleic acid sequence that is at least 85%, at least 86%, at least 87%, at least 88%, at least 89%, at least 90%, at least 91%, at least 92%, at least 93%, at least 94%, at least 95%, at least 96%, at least 97%, at least 98%, or at least 99% identical to the nucleic acid sequence of SEQ ID NO: 2400.

[0050] In some embodiments, the recombinant nucleic acid comprises a promoter comprising or consisting of a nucleic acid sequence that is at least 85%, at least 86%, at least 87%, at least 88%, at least 89%, at least 90%, at least 91%, at least 92%, at least 93%, at least 94%, at least 95%, at least 96%, at least 97%, at least 98%, or at least 99% identical to the nucleic acid sequence of SEQ ID NO: 2404; a sequence encoding microdystrophin comprising or consisting of a nucleic acid sequence that is at least 85%, at least 86%, at least 87%, at least 88%, at least 89%, at least 90%, at least 91%, at least 92%, at least 93%, at least 94%, at least 95%, at least 96%, at least 97%, at least 98%, or at least 99% identical to the nucleic acid sequence of SEQ ID NO: 2406; and at least one DRG de-targeting miRNA binding site comprising or consisting of a nucleic acid sequence that is at least 85%, at least 86%, at least 87%, at least 88%, at least 89%, at least 90%, at least 91%, at least 92%, at least 93%, at least 94%, at least 95%, at least 96%, at least 97%, at least 98%, or at least 99% identical to the nucleic acid sequence of SEQ ID NO: 2400.

[0051] In some embodiments, the recombinant nucleic acid comprises a promoter comprising or consisting of a nucleic acid sequence that is at least 85%, at least 86%, at least 87%, at least 88%, at least 89%, at least 90%, at least 91%, at least 92%, at least 93%, at least 94%, at least 95%, at least 96%, at least 97%, at least 98%, or at least 99% identical to the nucleic acid sequence of SEQ ID NO: 2402; a sequence encoding microdystrophin comprising or consisting of a nucleic acid sequence that is at least 85%, at least 86%, at least 87%, at least 88%, at least 89%, at least 90%, at least 91%, at least 92%, at least 93%, at least 94%, at least 95%, at least 96%, at least 97%, at least 98%, or at least 99% identical to the nucleic acid sequence of SEQ ID NO: 2406; and at least one DRG de-targeting miRNA binding site comprising or consisting of a nucleic acid sequence that is at least 85%, at least 86%, at least 87%, at least 88%, at least 89%, at least 90%, at least 91%, at least 92%, at least 93%, at least 94%, at least 95%, at least 96%, at least 97%, at least 98%, or at least 99% identical to the nucleic acid sequence of SEQ ID NO: 2401.

[0052] In some embodiments, the recombinant nucleic acid comprises a promoter comprising or consisting of a nucleic acid sequence that is at least 85%, at least 86%, at least 87%, at least 88%, at least 89%, at least 90%, at least 91%, at least 92%, at least 93%, at least 94%, at least 95%, at least 96%, at least 97%, at least 98%, or at least 99% identical to the nucleic acid sequence of SEQ ID NO: 2403; a sequence encoding microdystrophin comprising or consisting of a nucleic acid sequence that is at least 85%, at least 86%, at least 87%, at least 88%, at least 89%, at least 90%, at least 91%, at least 92%, at least 93%, at least 94%, at least 95%, at least 96%, at least 97%, at least 98%, or at least 99% identical to the nucleic acid sequence of SEQ ID NO: 2406; and at least one DRG de-targeting miRNA binding site comprising or consisting of a nucleic acid sequence that is at least 85%, at least 86%, at least 87%, at least 88%, at least 89%, at least 90%, at least 91%, at least 92%, at least 93%, at least 94%, at least 95%, at least 96%, at least 97%, at least 98%, or at least 99% identical to the nucleic acid sequence of SEQ ID NO: 2401.

[0053] In some embodiments, the recombinant nucleic acid comprises a promoter comprising or consisting of a nucleic acid sequence that is at least 85%, at least 86%, at least 87%, at least 88%, at least 89%, at least 90%, at least 91%, at least 92%, at least 93%, at least 94%, at least 95%, at least 96%, at least 97%, at least 98%, or at least 99% identical to the nucleic acid sequence of SEQ ID NO: 2404; a sequence encoding microdystrophin comprising or consisting of a nucleic acid sequence that is at least 85%, at least 86%, at least 87%, at least 88%, at least 89%, at least 90%, at least 91%, at least 92%, at least 93%, at least 94%, at least 95%, at least 96%, at least 97%, at least 98%, or at least 99% identical to the nucleic acid sequence of SEQ ID NO: 2406; and at least one DRG de-targeting miRNA binding site comprising or consisting of a nucleic acid sequence that is at least 85%, at least 86%, at least 87%, at least 88%, at least 89%, at least 90%, at least 91%, at least 92%, at least 93%, at least 94%, at least 95%, at least 96%, at least 97%, at least 98%, or at least 99% identical to the nucleic acid sequence of SEQ ID NO: 2401.

[0054] In some embodiments, the recombinant nucleic acid comprises a promoter comprising or consisting of a nucleic acid sequence that is at least 85%, at least 86%, at least 87%, at least 88%, at least 89%, at least 90%, at least 91%, at least 92%, at least 93%, at least 94%, at least 95%, at least 96%, at least 97%, at least 98%, or at least 99% identical to the nucleic acid sequence of SEQ ID NO: 2402; a sequence encoding microdystrophin comprising or consisting of a nucleic acid sequence that is at least 85%, at least 86%, at least 87%, at least 88%, at least 89%, at least 90%, at least 91%, at least 92%, at least 93%, at least 94%, at least 95%, at least 96%, at least 97%, at least 98%, or at least 99% identical to the nucleic acid sequence of SEQ ID NO: 2407; and at least one DRG de-targeting miRNA binding site comprising or consisting of a nucleic acid sequence that is at least 85%, at least 86%, at least 87%, at least 88%, at least 89%, at least 90%, at least 91%, at least 92%, at least 93%, at least 94%, at least 95%, at least 96%, at least 97%, at least 98%, or at least 99% identical to the nucleic acid sequence of SEQ ID NO: 2399.

[0055] In some embodiments, the recombinant nucleic acid comprises a promoter comprising or consisting of a nucleic acid sequence that is at least 85%, at least 86%, at least 87%, at least 88%, at least 89%, at least 90%, at least 91%, at least 92%, at least 93%, at least 94%, at least 95%, at least 96%, at least 97%, at least 98%, or at least 99% identical to the nucleic acid sequence of SEQ ID NO: 2403; a sequence encoding microdystrophin comprising or consisting of a nucleic acid sequence that is at least 85%, at least 86%, at least 87%, at least 88%, at least 89%, at least 90%, at least 91%, at least 92%, at least 93%, at least 94%, at least 95%, at least 96%, at least 97%, at least 98%, or at least 99% identical to the nucleic acid sequence of SEQ ID NO: 2407; and at least one DRG de-targeting miRNA binding site comprising or consisting of a nucleic acid sequence that is at least 85%, at least 86%, at least 87%, at least 88%, at least 89%, at least 90%, at least 91%, at least 92%, at least 93%, at least 94%, at least 95%, at least 96%, at least 97%, at least 98%, or at least 99% identical to the nucleic acid sequence of SEQ ID NO: 2399.

[0056] In some embodiments, the recombinant nucleic acid comprises a promoter comprising or consisting of a nucleic acid sequence that is at least 85%, at least 86%, at least 87%, at least 88%, at least 89%, at least 90%, at least 91%, at least 92%, at least 93%, at least 94%, at least 95%, at least 96%, at least 97%, at least 98%, or at least 99% identical to the nucleic acid sequence of SEQ ID NO: 2404; a sequence encoding microdystrophin comprising or consisting of a nucleic acid sequence that is at least 85%, at least 86%, at least 87%, at least 88%, at least 89%, at least 90%, at least 91%, at least 92%, at least 93%, at least 94%, at least 95%, at least 96%, at least 97%, at least 98%, or at least 99% identical to the nucleic acid sequence of SEQ ID NO: 2407; and at least one DRG de-targeting miRNA binding site comprising or consisting of a nucleic acid sequence that is at least 85%, at least 86%, at least 87%, at least 88%, at least 89%, at least 90%, at least 91%, at least 92%, at least 93%, at least 94%, at least 95%, at least 96%, at least 97%, at least 98%, or at least 99% identical to the nucleic acid sequence of SEQ ID NO: 2399.

[0057] In some embodiments, the recombinant nucleic acid comprises a promoter comprising or consisting of a nucleic acid sequence that is at least 85%, at least 86%, at least 87%, at least 88%, at least 89%, at least 90%, at least 91%, at least 92%, at least 93%, at least 94%, at least 95%, at least 96%, at least 97%, at least 98%, or at least 99% identical to the nucleic acid sequence of SEQ ID NO: 2402; a sequence encoding microdystrophin comprising or consisting of a nucleic acid sequence that is at least 85%, at least 86%, at least 87%, at least 88%, at least 89%, at least 90%, at least 91%, at least 92%, at least 93%, at least 94%, at least 95%, at least 96%, at least 97%, at least 98%, or at least 99% identical to the nucleic acid sequence of SEQ ID NO: 2407; and at least one DRG de-targeting miRNA binding site comprising or consisting of a nucleic acid sequence that is at least 85%, at least 86%, at least 87%, at least 88%, at least 89%, at least 90%, at least 91%, at least 92%, at least 93%, at least 94%, at least 95%, at least 96%, at least 97%, at least 98%, or at least 99% identical to the nucleic acid sequence of SEQ ID NO: 2400.

[0058] In some embodiments, the recombinant nucleic acid comprises a promoter comprising or consisting of a nucleic acid sequence that is at least 85%, at least 86%, at least 87%, at least 88%, at least 89%, at least 90%, at least 91%, at least 92%, at least 93%, at least 94%, at least 95%, at least 96%, at least 97%, at least 98%, or at least 99% identical to the nucleic acid sequence of SEQ ID NO: 2403; a sequence encoding microdystrophin comprising or consisting of a nucleic acid sequence that is at least 85%, at least 86%, at least 87%, at least 88%, at least 89%, at least 90%, at least 91%, at least 92%, at least 93%, at least 94%, at least 95%, at least 96%, at least 97%, at least 98%, or at least 99% identical to the nucleic acid sequence of SEQ ID NO: 2407; and at least one DRG de-targeting miRNA binding site comprising or consisting of a nucleic acid sequence that is at least 85%, at least 86%, at least 87%, at least 88%, at least 89%, at least 90%, at least 91%, at least 92%, at least 93%, at least 94%, at least 95%, at least 96%, at least 97%, at least 98%, or at least 99% identical to the nucleic acid sequence of SEQ ID NO: 2400.

[0059] In some embodiments, the recombinant nucleic acid comprises a promoter comprising or consisting of a nucleic acid sequence that is at least 85%, at least 86%, at least 87%, at least 88%, at least 89%, at least 90%, at least 91%, at least 92%, at least 93%, at least 94%, at least 95%, at least 96%, at least 97%, at least 98%, or at least 99% identical to the nucleic acid sequence of SEQ ID NO: 2404; a sequence encoding microdystrophin comprising or consisting of a nucleic acid sequence that is at least 85%, at least 86%, at least 87%, at least 88%, at least 89%, at least 90%, at least 91%, at least 92%, at least 93%, at least 94%, at least 95%, at least 96%, at least 97%, at least 98%, or at least 99% identical to the nucleic acid sequence of SEQ ID NO: 2407; and at least one DRG de-targeting miRNA binding site comprising or consisting of a nucleic acid sequence that is at least 85%, at least 86%, at least 87%, at least 88%, at least 89%, at least 90%, at least 91%, at least 92%, at least 93%, at least 94%, at least 95%, at least 96%, at least 97%, at least 98%, or at least 99% identical to the nucleic acid sequence of SEQ ID NO: 2400.

[0060] In some embodiments, the recombinant nucleic acid comprises a promoter comprising or consisting of a nucleic acid sequence that is at least 85%, at least 86%, at least 87%, at least 88%, at least 89%, at least 90%, at least 91%, at least 92%, at least 93%, at least 94%, at least 95%, at least 96%, at least 97%, at least 98%, or at least 99% identical to the nucleic acid sequence of SEQ ID NO: 2402; a sequence encoding microdystrophin comprising or consisting of a nucleic acid sequence that is at least 85%, at least 86%, at least 87%, at least 88%, at least 89%, at least 90%, at least 91%, at least 92%, at least 93%, at least 94%, at least 95%, at least 96%, at least 97%, at least 98%, or at least 99% identical to the nucleic acid sequence of SEQ ID NO: 2407; and at least one DRG de-targeting miRNA binding site comprising or consisting of a nucleic acid sequence that is at least 85%, at least 86%, at least 87%, at least 88%, at least 89%, at least 90%, at least 91%, at least 92%, at least 93%, at least 94%, at least 95%, at least 96%, at least 97%, at least 98%, or at least 99% identical to the nucleic acid sequence of SEQ ID NO: 2401.

[0061] In some embodiments, the recombinant nucleic acid comprises a promoter comprising or consisting of a nucleic acid sequence that is at least 85%, at least 86%, at least 87%, at least 88%, at least 89%, at least 90%, at least 91%, at least 92%, at least 93%, at least 94%, at least 95%, at least 96%, at least 97%, at least 98%, or at least 99% identical to the nucleic acid sequence of SEQ ID NO: 2403; a sequence encoding microdystrophin comprising or consisting of a nucleic acid sequence that is at least 85%, at least 86%, at least 87%, at least 88%, at least 89%, at least 90%, at least 91%, at least 92%, at least 93%, at least 94%, at least 95%, at least 96%, at least 97%, at least 98%, or at least 99% identical to the nucleic acid sequence of SEQ ID NO: 2407; and at least one DRG de-targeting miRNA binding site comprising or consisting of a nucleic acid sequence that is at least 85%, at least 86%, at least 87%, at least 88%, at least 89%, at least 90%, at least 91%, at least 92%, at least 93%, at least 94%, at least 95%, at least 96%, at least 97%, at least 98%, or at least 99% identical to the nucleic acid sequence of SEQ ID NO: 2401.

[0062] In some embodiments, the recombinant nucleic acid comprises a promoter comprising or consisting of a nucleic acid sequence that is at least 85%, at least 86%, at least 87%, at least 88%, at least 89%, at least 90%, at least 91%, at least 92%, at least 93%, at least 94%, at least 95%, at least 96%, at least 97%, at least 98%, or at least 99% identical to the nucleic acid sequence of SEQ ID NO: 2404; a sequence encoding microdystrophin comprising or consisting of a nucleic acid sequence that is at least 85%, at least 86%, at least 87%, at least 88%, at least 89%, at least 90%, at least 91%, at least 92%, at least 93%, at least 94%, at least 95%, at least 96%, at least 97%, at least 98%, or at least 99% identical to the nucleic acid sequence of SEQ ID NO: 2407; and at least one DRG de-targeting miRNA binding site comprising or consisting of a nucleic acid sequence that is at least 85%, at least 86%, at least 87%, at least 88%, at least 89%, at least 90%, at least 91%, at least 92%, at least 93%, at least 94%, at least 95%, at least 96%, at least 97%, at least 98%, or at least 99% identical to the nucleic acid sequence of SEQ ID NO: 2401.

[0063] In some embodiments, the recombinant nucleic acid comprises a promoter comprising or consisting of the nucleic acid sequence of SEQ ID NO: 2402; a sequence encoding microdystrophin comprising or consisting of the nucleic acid sequence of SEQ ID NO: 2405; and at least one DRG de-targeting miRNA binding site comprising or consisting of the nucleic acid sequence of SEQ ID NO: 2399.

[0064] In some embodiments, the recombinant nucleic acid comprises a promoter comprising or consisting of the nucleic acid sequence of SEQ ID NO: 2403; a sequence encoding microdystrophin comprising or consisting of the nucleic acid sequence of SEQ ID NO: 2405; and at least one DRG de-targeting miRNA binding site comprising or consisting of the nucleic acid sequence of SEQ ID NO: 2399.

[0065] In some embodiments, the recombinant nucleic acid comprises a promoter comprising or consisting of the nucleic acid sequence of SEQ ID NO: 2404; a sequence encoding microdystrophin comprising or consisting of the nucleic acid sequence of SEQ ID NO: 2405; and at least one DRG de-targeting miRNA binding site comprising or consisting of the nucleic acid sequence of SEQ ID NO: 2399.

[0066] In some embodiments, the recombinant nucleic acid comprises a promoter comprising or consisting of the nucleic acid sequence of SEQ ID NO: 2402; a sequence encoding microdystrophin comprising or consisting of the nucleic acid sequence of SEQ ID NO: 2405; and at least one DRG de-targeting miRNA binding site comprising or consisting of the nucleic acid sequence of SEQ ID NO: 2400.

[0067] In some embodiments, the recombinant nucleic acid comprises a promoter comprising or consisting of the nucleic acid sequence of SEQ ID NO: 2403; a sequence encoding microdystrophin comprising or consisting of the nucleic acid sequence of SEQ ID NO: 2405; and at least one DRG de-targeting miRNA binding site comprising or consisting of the nucleic acid sequence of SEQ ID NO: 2400.

[0068] In some embodiments, the recombinant nucleic acid comprises a promoter comprising or consisting of the nucleic acid sequence of SEQ ID NO: 2404; a sequence encoding microdystrophin comprising or consisting of the nucleic acid sequence of SEQ ID NO: 2405; and at least one DRG de-targeting miRNA binding site comprising or consisting of the nucleic acid sequence of SEQ ID NO: 2400.

[0069] In some embodiments, the recombinant nucleic acid comprises a promoter comprising or consisting of the nucleic acid sequence of SEQ ID NO: 2402; a sequence encoding microdystrophin comprising or consisting of the nucleic acid sequence of SEQ ID NO: 2405; and at least one DRG de-targeting miRNA binding site comprising or consisting of the nucleic acid sequence of SEQ ID NO: 2401.

[0070] In some embodiments, the recombinant nucleic acid comprises a promoter comprising or consisting of the nucleic acid sequence of SEQ ID NO: 2403; a sequence encoding microdystrophin comprising or consisting of the nucleic acid sequence of SEQ ID NO: 2405; and at least one DRG de-targeting miRNA binding site comprising or consisting of the nucleic acid sequence of SEQ ID NO: 2401.

[0071] In some embodiments, the recombinant nucleic acid comprises a promoter comprising or consisting of the nucleic acid sequence of SEQ ID NO: 2404; a sequence encoding microdystrophin comprising or consisting of the nucleic acid sequence of SEQ ID NO: 2405; and at least one DRG de-targeting miRNA binding site comprising or consisting of the nucleic acid sequence of SEQ ID NO: 2401.

[0072] In some embodiments, the recombinant nucleic acid comprises a promoter comprising or consisting of the nucleic acid sequence of SEQ ID NO: 2402; a sequence encoding microdystrophin comprising or consisting of the nucleic acid sequence of SEQ ID NO: 2406; and at least one DRG de-targeting miRNA binding site comprising or consisting of the nucleic acid sequence of SEQ ID NO: 2399.

[0073] In some embodiments, the recombinant nucleic acid comprises a promoter comprising or consisting of the nucleic acid sequence of SEQ ID NO: 2403; a sequence encoding microdystrophin comprising or consisting of the nucleic acid sequence of SEQ ID NO: 2406; and at least one DRG de-targeting miRNA binding site comprising or consisting of the nucleic acid sequence of SEQ ID NO: 2399.

[0074] In some embodiments, the recombinant nucleic acid comprises a promoter comprising or consisting of the nucleic acid sequence of SEQ ID NO: 2404; a sequence encoding microdystrophin comprising or consisting of the nucleic acid sequence of SEQ ID NO: 2406; and at least one DRG de-targeting miRNA binding site comprising or consisting of the nucleic acid sequence of SEQ ID NO: 2399.

[0075] In some embodiments, the recombinant nucleic acid comprises a promoter comprising or consisting of the nucleic acid sequence of SEQ ID NO: 2402; a sequence encoding microdystrophin comprising or consisting of the nucleic acid sequence of SEQ ID NO: 2406; and at least one DRG de-targeting miRNA binding site comprising or consisting of the nucleic acid sequence of SEQ ID NO: 2400.

[0076] In some embodiments, the recombinant nucleic acid comprises a promoter comprising or consisting of the nucleic acid sequence of SEQ ID NO: 2403; a sequence encoding microdystrophin comprising or consisting of the nucleic acid sequence of SEQ ID NO: 2406; and at least one DRG de-targeting miRNA binding site comprising or consisting of the nucleic acid sequence of SEQ ID NO: 2400.

[0077] In some embodiments, the recombinant nucleic acid comprises a promoter comprising or consisting of the nucleic acid sequence of SEQ ID NO: 2404; a sequence encoding microdystrophin comprising or consisting of the nucleic acid sequence of SEQ ID NO: 2406; and at least one DRG de-targeting miRNA binding site comprising or consisting of the nucleic acid sequence of SEQ ID NO: 2400.

[0078] In some embodiments, the recombinant nucleic acid comprises a promoter comprising or consisting of the nucleic acid sequence of SEQ ID NO: 2402; a sequence encoding microdystrophin comprising or consisting of the nucleic acid sequence of SEQ ID NO: 2406; and at least one DRG de-targeting miRNA binding site comprising or consisting of the nucleic acid sequence of SEQ ID NO: 2401.

[0079] In some embodiments, the recombinant nucleic acid comprises a promoter comprising or consisting of the nucleic acid sequence of SEQ ID NO: 2403; a sequence encoding microdystrophin comprising or consisting of the nucleic acid sequence of SEQ ID NO: 2406; and at least one DRG de-targeting miRNA binding site comprising or consisting of the nucleic acid sequence of SEQ ID NO: 2401.

[0080] In some embodiments, the recombinant nucleic acid comprises a promoter comprising or consisting of the nucleic acid sequence of SEQ ID NO: 2404; a sequence encoding microdystrophin comprising or consisting of the nucleic acid sequence of SEQ ID NO: 2406; and at least one DRG de-targeting miRNA binding site comprising or consisting of the nucleic acid sequence of SEQ ID NO: 2401.

[0081] In some embodiments, the recombinant nucleic acid comprises a promoter comprising or consisting of the nucleic acid sequence of SEQ ID NO: 2402; a sequence encoding microdystrophin comprising or consisting of the nucleic acid sequence of SEQ ID NO: 2407; and at least one DRG de-targeting miRNA binding site comprising or consisting of the nucleic acid sequence of SEQ ID NO: 2399.

[0082] In some embodiments, the recombinant nucleic acid comprises a promoter comprising or consisting of the nucleic acid sequence of SEQ ID NO: 2403; a sequence encoding microdystrophin comprising or consisting of the nucleic acid sequence of SEQ ID NO: 2407; and at least one DRG de-targeting miRNA binding site comprising or consisting of the nucleic acid sequence of SEQ ID NO: 2399.

[0083] In some embodiments, the recombinant nucleic acid comprises a promoter comprising or consisting of the nucleic acid sequence of SEQ ID NO: 2404; a sequence encoding microdystrophin comprising or consisting of the nucleic acid sequence of SEQ ID NO: 2407; and at least one DRG de-targeting miRNA binding site comprising or consisting of the nucleic acid sequence of SEQ ID NO: 2399.

[0084] In some embodiments, the recombinant nucleic acid comprises a promoter comprising or consisting of the nucleic acid sequence of SEQ ID NO: 2402; a sequence encoding microdystrophin comprising or consisting of the nucleic acid sequence of SEQ ID NO: 2407; and at least one DRG de-targeting miRNA binding site comprising or consisting of the nucleic acid sequence of SEQ ID NO: 2400.

[0085] In some embodiments, the recombinant nucleic acid comprises a promoter comprising or consisting of the nucleic acid sequence of SEQ ID NO: 2403; a sequence encoding microdystrophin comprising or consisting of the nucleic acid sequence of SEQ ID NO: 2407; and at least one DRG de-targeting miRNA binding site comprising or consisting of the nucleic acid sequence of SEQ ID NO: 2400.

[0086] In some embodiments, the recombinant nucleic acid comprises a promoter comprising or consisting of the nucleic acid sequence of SEQ ID NO: 2404; a sequence encoding microdystrophin comprising or consisting of the nucleic acid sequence of SEQ ID NO: 2407; and at least one DRG de-targeting miRNA binding site comprising or consisting of the nucleic acid sequence of SEQ ID NO: 2400.

[0087] In some embodiments, the recombinant nucleic acid comprises a promoter comprising or consisting of the nucleic acid sequence of SEQ ID NO: 2402; a sequence encoding microdystrophin comprising or consisting of the nucleic acid sequence of SEQ ID NO: 2407; and at least one DRG de-targeting miRNA binding site comprising or consisting of the nucleic acid sequence of SEQ ID NO: 2401.

[0088] In some embodiments, the recombinant nucleic acid comprises a promoter comprising or consisting of the nucleic acid sequence of SEQ ID NO: 2403; a sequence encoding microdystrophin comprising or consisting of the nucleic acid sequence of SEQ ID NO: 2407; and at least one DRG de-targeting miRNA binding site comprising or consisting of the nucleic acid sequence of SEQ ID NO: 2401.

[0089] In some embodiments, the recombinant nucleic acid comprises a promoter comprising or consisting of the nucleic acid sequence of SEQ ID NO: 2404; a sequence encoding microdystrophin comprising or consisting of the nucleic acid sequence of SEQ ID NO: 2407; and at least one DRG de-targeting miRNA binding site comprising or consisting of the nucleic acid sequence of SEQ ID NO: 2401.

[0090] In some embodiments, the recombinant nucleic acid further comprises an intron. In some embodiments, the intron comprises a simian virus 40 (SV40) intron sequence, a minute virus of mice (MVM) intron, a RK intron, a β-globin intron, and/or a chicken β-actin (CBA) intron, including functional variants or fragments thereof. In some embodiments, the intron comprises or consists of a nucleic acid sequence that is at least 85%, at least 86%, at least 87%, at least 88%, at least 89%, at least 90%, at least 91%, at least 92%, at least 93%, at least 94%, at least 95%, at least 96%, at least 97%, at least 98%, or at least 99% identical to the nucleic acid sequence of SEQ ID NO: 2409. In some embodiments, the intron comprises or consists of the nucleic acid sequence of SEQ ID NO: 2409.

[0091] In some embodiments, the recombinant nucleic acid further comprises a polyadenylation (PolyA) signal. In some embodiments, the Poly A signal comprises a bovine growth hormone polyadenylation (bgh-Poly A) signal, a synthetic PolyA signal, or an SV40 Poly A signal. In some embodiments, the PolyA signal comprises the bgh-Poly A signal, and the bgh-Poly A signal comprises or consists of a nucleic acid sequence that is at least 85%, at least 86%, at least 87%, at least 88%, at least 89%, at least 90%, at least 91%, at least 92%, at least 93%, at least 94%, at least 95%, at least 96%, at least 97%, at least 98%, or at least 99% identical to the nucleic acid sequence of SEQ ID NO: 2410. In some embodiments, the PolyA signal comprises the bgh-Poly A signal, and the bgh-Poly A signal comprises or consists of the nucleic acid sequence of SEQ ID NO: 2410.

[0092] In some embodiments, the recombinant nucleic acid further comprises a 5′ inverted terminal repeat (ITR) and a 3′ ITR. In some embodiments, the 5′ ITR and/or the 3′ ITR is an adeno-associated virus 2 (AAV2) ITR, or a variant or fragment thereof.

[0093] In some embodiments, the 5′ ITR comprises or consists of a nucleic acid sequence that is at least 85%, at least 86%, at least 87%, at least 88%, at least 89%, at least 90%, at least 91%, at least 92%, at least 93%, at least 94%, at least 95%, at least 96%, at least 97%, at least 98%, or at least 99% identical to the nucleic acid sequence of SEQ ID NO: 2408. In some embodiments, the 5′ ITR comprises or consists of the nucleic acid sequence of SEQ ID NO: 2408.

[0094] In some embodiments, the 3′ ITR comprises or consists of a nucleic acid sequence that is at least 85%, at least 86%, at least 87%, at least 88%, at least 89%, at least 90%, at least 91%, at least 92%, at least 93%, at least 94%, at least 95%, at least 96%, at least 97%, at least 98%, or at least 99% identical to the nucleic acid sequence of SEQ ID NO: 2411. In some embodiments, the 3′ ITR comprises or consists of the nucleic acid sequence of SEQ ID NO: 2411.

[0095] In some embodiments, the recombinant nucleic acid comprises, optionally from 5′ to 3′, a 5′ ITR; a promoter; an intron; a sequence encoding microdystrophin; a first DRG de-targeting miRNA binding site; a second DRG de-targeting miRNA binding site; a PolyA signal; and a 3′ ITR.

[0096] In some embodiments, the recombinant nucleic acid comprises a 5′ ITR comprising or consisting of a nucleic acid sequence that is at least 85%, at least 86%, at least 87%, at least 88%, at least 89%, at least 90%, at least 91%, at least 92%, at least 93%, at least 94%, at least 95%, at least 96%, at least 97%, at least 98%, or at least 99% identical to the nucleic acid sequence of SEQ ID NO: 2408; a promoter comprising or consisting of a nucleic acid sequence that is at least 85%, at least 86%, at least 87%, at least 88%, at least 89%, at least 90%, at least 91%, at least 92%, at least 93%, at least 94%, at least 95%, at least 96%, at least 97%, at least 98%, or at least 99% identical to the nucleic acid sequence of SEQ ID NO: 2402; an intron comprising or consisting of a nucleic acid sequence that is at least 85%, at least 86%, at least 87%, at least 88%, at least 89%, at least 90%, at least 91%, at least 92%, at least 93%, at least 94%, at least 95%, at least 96%, at least 97%, at least 98%, or at least 99% identical to the nucleic acid sequence of SEQ ID NO: 2409; a sequence encoding microdystrophin comprising or consisting of a nucleic acid sequence that is at least 85%, at least 86%, at least 87%, at least 88%, at least 89%, at least 90%, at least 91%, at least 92%, at least 93%, at least 94%, at least 95%, at least 96%, at least 97%, at least 98%, or at least 99% identical to the nucleic acid sequence of SEQ ID NO: 2405; a first DRG de-targeting miRNA binding site comprising or consisting of a nucleic acid sequence that is at least 85%, at least 86%, at least 87%, at least 88%, at least 89%, at least 90%, at least 91%, at least 92%, at least 93%, at least 94%, at least 95%, at least 96%, at least 97%, at least 98%, or at least 99% identical to the nucleic acid sequence of SEQ ID NO: 2399; a second DRG de-targeting miRNA binding site comprising or consisting of a nucleic acid sequence that is at least 85%, at least 86%, at least 87%, at least 88%, at least 89%, at least 90%, at least 91%, at least 92%, at least 93%, at least 94%, at least 95%, at least 96%, at least 97%, at least 98%, or at least 99% identical to the nucleic acid sequence of SEQ ID NO: 2399; a PolyA signal comprising or consisting of a nucleic acid sequence that is at least 85%, at least 86%, at least 87%, at least 88%, at least 89%, at least 90%, at least 91%, at least 92%, at least 93%, at least 94%, at least 95%, at least 96%, at least 97%, at least 98%, or at least 99% identical to the nucleic acid sequence of SEQ ID NO: 2410; and a 3′ ITR comprising or consisting of a nucleic acid sequence that is at least 85%, at least 86%, at least 87%, at least 88%, at least 89%, at least 90%, at least 91%, at least 92%, at least 93%, at least 94%, at least 95%, at least 96%, at least 97%, at least 98%, or at least 99% identical to the nucleic acid sequence of SEQ ID NO: 2411.

[0097] In some embodiments, the recombinant nucleic acid comprises a 5′ ITR comprising or consisting of a nucleic acid sequence that is at least 85%, at least 86%, at least 87%, at least 88%, at least 89%, at least 90%, at least 91%, at least 92%, at least 93%, at least 94%, at least 95%, at least 96%, at least 97%, at least 98%, or at least 99% identical to the nucleic acid sequence of SEQ ID NO: 2408; a promoter comprising or consisting of a nucleic acid sequence that is at least 85%, at least 86%, at least 87%, at least 88%, at least 89%, at least 90%, at least 91%, at least 92%, at least 93%, at least 94%, at least 95%, at least 96%, at least 97%, at least 98%, or at least 99% identical to the nucleic acid sequence of SEQ ID NO: 2403; an intron comprising or consisting of a nucleic acid sequence that is at least 85%, at least 86%, at least 87%, at least 88%, at least 89%, at least 90%, at least 91%, at least 92%, at least 93%, at least 94%, at least 95%, at least 96%, at least 97%, at least 98%, or at least 99% identical to the nucleic acid sequence of SEQ ID NO: 2409; a sequence encoding microdystrophin comprising or consisting of a nucleic acid sequence that is at least 85%, at least 86%, at least 87%, at least 88%, at least 89%, at least 90%, at least 91%, at least 92%, at least 93%, at least 94%, at least 95%, at least 96%, at least 97%, at least 98%, or at least 99% identical to the nucleic acid sequence of SEQ ID NO: 2405; a first DRG de-targeting miRNA binding site comprising or consisting of a nucleic acid sequence that is at least 85%, at least 86%, at least 87%, at least 88%, at least 89%, at least 90%, at least 91%, at least 92%, at least 93%, at least 94%, at least 95%, at least 96%, at least 97%, at least 98%, or at least 99% identical to the nucleic acid sequence of SEQ ID NO: 2399; a second DRG de-targeting miRNA binding site comprising or consisting of a nucleic acid sequence that is at least 85%, at least 86%, at least 87%, at least 88%, at least 89%, at least 90%, at least 91%, at least 92%, at least 93%, at least 94%, at least 95%, at least 96%, at least 97%, at least 98%, or at least 99% identical to the nucleic acid sequence of SEQ ID NO: 2399; a PolyA signal comprising or consisting of a nucleic acid sequence that is at least 85%, at least 86%, at least 87%, at least 88%, at least 89%, at least 90%, at least 91%, at least 92%, at least 93%, at least 94%, at least 95%, at least 96%, at least 97%, at least 98%, or at least 99% identical to the nucleic acid sequence of SEQ ID NO: 2410; and a 3′ ITR comprising or consisting of a nucleic acid sequence that is at least 85%, at least 86%, at least 87%, at least 88%, at least 89%, at least 90%, at least 91%, at least 92%, at least 93%, at least 94%, at least 95%, at least 96%, at least 97%, at least 98%, or at least 99% identical to the nucleic acid sequence of SEQ ID NO:

[0098] 2411.

[0099] In some embodiments, the recombinant nucleic acid comprises a 5′ ITR comprising or consisting of a nucleic acid sequence that is at least 85%, at least 86%, at least 87%, at least 88%, at least 89%, at least 90%, at least 91%, at least 92%, at least 93%, at least 94%, at least 95%, at least 96%, at least 97%, at least 98%, or at least 99% identical to the nucleic acid sequence of SEQ ID NO: 2408; a promoter comprising or consisting of a nucleic acid sequence that is at least 85%, at least 86%, at least 87%, at least 88%, at least 89%, at least 90%, at least 91%, at least 92%, at least 93%, at least 94%, at least 95%, at least 96%, at least 97%, at least 98%, or at least 99% identical to the nucleic acid sequence of SEQ ID NO: 2404; an intron comprising or consisting of a nucleic acid sequence that is at least 85%, at least 86%, at least 87%, at least 88%, at least 89%, at least 90%, at least 91%, at least 92%, at least 93%, at least 94%, at least 95%, at least 96%, at least 97%, at least 98%, or at least 99% identical to the nucleic acid sequence of SEQ ID NO: 2409; a sequence encoding microdystrophin comprising or consisting of a nucleic acid sequence that is at least 85%, at least 86%, at least 87%, at least 88%, at least 89%, at least 90%, at least 91%, at least 92%, at least 93%, at least 94%, at least 95%, at least 96%, at least 97%, at least 98%, or at least 99% identical to the nucleic acid sequence of SEQ ID NO: 2405; a first DRG de-targeting miRNA binding site comprising or consisting of a nucleic acid sequence that is at least 85%, at least 86%, at least 87%, at least 88%, at least 89%, at least 90%, at least 91%, at least 92%, at least 93%, at least 94%, at least 95%, at least 96%, at least 97%, at least 98%, or at least 99% identical to the nucleic acid sequence of SEQ ID NO: 2399; a second DRG de-targeting miRNA binding site comprising or consisting of a nucleic acid sequence that is at least 85%, at least 86%, at least 87%, at least 88%, at least 89%, at least 90%, at least 91%, at least 92%, at least 93%, at least 94%, at least 95%, at least 96%, at least 97%, at least 98%, or at least 99% identical to the nucleic acid sequence of SEQ ID NO: 2399; a PolyA signal comprising or consisting of a nucleic acid sequence that is at least 85%, at least 86%, at least 87%, at least 88%, at least 89%, at least 90%, at least 91%, at least 92%, at least 93%, at least 94%, at least 95%, at least 96%, at least 97%, at least 98%, or at least 99% identical to the nucleic acid sequence of SEQ ID NO: 2410; and a 3′ ITR comprising or consisting of a nucleic acid sequence that is at least 85%, at least 86%, at least 87%, at least 88%, at least 89%, at least 90%, at least 91%, at least 92%, at least 93%, at least 94%, at least 95%, at least 96%, at least 97%, at least 98%, or at least 99% identical to the nucleic acid sequence of SEQ ID NO: 2411.

[0100] In some embodiments, the recombinant nucleic acid comprises a 5′ ITR comprising or consisting of a nucleic acid sequence that is at least 85%, at least 86%, at least 87%, at least 88%, at least 89%, at least 90%, at least 91%, at least 92%, at least 93%, at least 94%, at least 95%, at least 96%, at least 97%, at least 98%, or at least 99% identical to the nucleic acid sequence of SEQ ID NO: 2408; a promoter comprising or consisting of a nucleic acid sequence that is at least 85%, at least 86%, at least 87%, at least 88%, at least 89%, at least 90%, at least 91%, at least 92%, at least 93%, at least 94%, at least 95%, at least 96%, at least 97%, at least 98%, or at least 99% identical to the nucleic acid sequence of SEQ ID NO: 2402; an intron comprises or consists of a nucleic acid sequence that is at least 85%, at least 86%, at least 87%, at least 88%, at least 89%, at least 90%, at least 91%, at least 92%, at least 93%, at least 94%, at least 95%, at least 96%, at least 97%, at least 98%, or at least 99% identical to the nucleic acid sequence of SEQ ID NO: 2409; a sequence encoding microdystrophin comprising or consisting of a nucleic acid sequence that is at least 85%, at least 86%, at least 87%, at least 88%, at least 89%, at least 90%, at least 91%, at least 92%, at least 93%, at least 94%, at least 95%, at least 96%, at least 97%, at least 98%, or at least 99% identical to the nucleic acid sequence of SEQ ID NO: 2405; a first DRG de-targeting miRNA binding site comprising or consisting of a nucleic acid sequence that is at least 85%, at least 86%, at least 87%, at least 88%, at least 89%, at least 90%, at least 91%, at least 92%, at least 93%, at least 94%, at least 95%, at least 96%, at least 97%, at least 98%, or at least 99% identical to the nucleic acid sequence of SEQ ID NO: 2400; a second DRG de-targeting miRNA binding site comprising or consisting of a nucleic acid sequence that is at least 85%, at least 86%, at least 87%, at least 88%, at least 89%, at least 90%, at least 91%, at least 92%, at least 93%, at least 94%, at least 95%, at least 96%, at least 97%, at least 98%, or at least 99% identical to the nucleic acid sequence of SEQ ID NO: 2400; a PolyA signal comprising or consisting of a nucleic acid sequence that is at least 85%, at least 86%, at least 87%, at least 88%, at least 89%, at least 90%, at least 91%, at least 92%, at least 93%, at least 94%, at least 95%, at least 96%, at least 97%, at least 98%, or at least 99% identical to the nucleic acid sequence of SEQ ID NO: 2410; and a 3′ ITR comprising or consisting of a nucleic acid sequence that is at least 85%, at least 86%, at least 87%, at least 88%, at least 89%, at least 90%, at least 91%, at least 92%, at least 93%, at least 94%, at least 95%, at least 96%, at least 97%, at least 98%, or at least 99% identical to the nucleic acid sequence of SEQ ID NO: 2411.

[0101] In some embodiments, the recombinant nucleic acid comprises a 5′ ITR comprising or consisting of a nucleic acid sequence that is at least 85%, at least 86%, at least 87%, at least 88%, at least 89%, at least 90%, at least 91%, at least 92%, at least 93%, at least 94%, at least 95%, at least 96%, at least 97%, at least 98%, or at least 99% identical to the nucleic acid sequence of SEQ ID NO: 2408; a promoter comprising or consisting of a nucleic acid sequence that is at least 85%, at least 86%, at least 87%, at least 88%, at least 89%, at least 90%, at least 91%, at least 92%, at least 93%, at least 94%, at least 95%, at least 96%, at least 97%, at least 98%, or at least 99% identical to the nucleic acid sequence of SEQ ID NO:
[0102] 2403; an intron comprising or consisting of a nucleic acid sequence that is at least 85%, at least 86%, at least 87%, at least 88%, at least 89%, at least 90%, at least 91%, at least 92%, at least 93%, at least 94%, at least 95%, at least 96%, at least 97%, at least 98%, or at least 99% identical to the nucleic acid sequence of SEQ ID NO: 2409; a sequence encoding microdystrophin comprising or consisting of a nucleic acid sequence that is at least 85%, at least 86%, at least 87%, at least 88%, at least 89%, at least 90%, at least 91%, at least 92%, at least 93%, at least 94%, at least 95%, at least 96%, at least 97%, at least 98%, or at least 99% identical to the nucleic acid sequence of SEQ ID NO: 2405; a first DRG de-targeting miRNA binding site comprising or consisting of a nucleic acid sequence that is at least 85%, at least 86%, at least 87%, at least 88%, at least 89%, at least 90%, at least 91%, at least 92%, at least 93%, at least 94%, at least 95%, at least 96%, at least 97%, at least 98%, or at least 99% identical to the nucleic acid sequence of SEQ ID NO: 2400; a second DRG de-targeting miRNA binding site comprising or consisting of a nucleic acid sequence that is at least 85%, at least 86%, at least 87%, at least 88%, at least 89%, at least 90%, at least 91%, at least 92%, at least 93%, at least 94%, at least 95%, at least 96%, at least 97%, at least 98%, or at least 99% identical to the nucleic acid sequence of SEQ ID NO: 2400; a PolyA signal comprising or consisting of a nucleic acid sequence that is at least 85%, at least 86%, at least 87%, at least 88%, at least 89%, at least 90%, at least 91%, at least 92%, at least 93%, at least 94%, at least 95%, at least 96%, at least 97%, at least 98%, or at least 99% identical to the nucleic acid sequence of SEQ ID NO: 2410; and a 3′ ITR comprising or consisting of a nucleic acid sequence that is at least 85%, at least 86%, at least 87%, at least 88%, at least 89%, at least 90%, at least 91%, at least 92%, at least 93%, at least 94%, at least 95%, at least 96%, at least 97%, at least 98%, or at least 99% identical to the nucleic acid sequence of SEQ ID NO: 2411.

[0103] In some embodiments, the recombinant nucleic acid comprises a 5′ ITR comprising or consisting of a nucleic acid sequence that is at least 85%, at least 86%, at least 87%, at least 88%, at least 89%, at least 90%, at least 91%, at least 92%, at least 93%, at least 94%, at least 95%, at least 96%, at least 97%, at least 98%, or at least 99% identical to the nucleic acid sequence of SEQ ID NO: 2408; a promoter comprising or consisting of a nucleic acid sequence that is at least 85%, at least 86%, at least 87%, at least 88%, at least 89%, at least 90%, at least 91%, at least 92%, at least 93%, at least 94%, at least 95%, at least 96%, at least 97%, at least 98%, or at least 99% identical to the nucleic acid sequence of SEQ ID NO: 2404; an intron comprises or consists of a nucleic acid sequence that is at least 85%, at least 86%, at least 87%, at least 88%, at least 89%, at least 90%, at least 91%, at least 92%, at least 93%, at least 94%, at least 95%, at least 96%, at least 97%, at least 98%, or at least 99% identical to the nucleic acid sequence of SEQ ID NO: 2409; a sequence encoding microdystrophin comprising or consisting of a nucleic acid sequence that is at least 85%, at least 86%, at least 87%, at least 88%, at least 89%, at least 90%, at least 91%, at least 92%, at least 93%, at least 94%, at least 95%, at least 96%, at least 97%, at least 98%, or at least 99% identical to the nucleic acid sequence of SEQ ID NO: 2405; a first DRG de-targeting miRNA binding site comprising or consisting of a nucleic acid sequence that is at least 85%, at least 86%, at least 87%, at least 88%, at least 89%, at least 90%, at least 91%, at least 92%, at least 93%, at least 94%, at least 95%, at least 96%, at least 97%, at least 98%, or at least 99% identical to the nucleic acid sequence of SEQ ID NO: 2400; a second DRG de-targeting miRNA binding site comprising or consisting of a nucleic acid sequence that is at least 85%, at least 86%, at least 87%, at least 88%, at least 89%, at least 90%, at least 91%, at least 92%, at least 93%, at least 94%, at least 95%, at least 96%, at least 97%, at least 98%, or at least 99% identical to the nucleic acid sequence of SEQ ID NO: 2400; a PolyA signal comprising or consisting of a nucleic acid sequence that is at least 85%, at least 86%, at least 87%, at least 88%, at least 89%, at least 90%, at least 91%, at least 92%, at least 93%, at least 94%, at least 95%, at least 96%, at least 97%, at least 98%, or at least 99% identical to the nucleic acid sequence of SEQ ID NO: 2410; and a 3′ ITR comprising or consisting of a nucleic acid sequence that is at least 85%, at least 86%, at least 87%, at least 88%, at least 89%, at least 90%, at least 91%, at least 92%, at least 93%, at least 94%, at least 95%, at least 96%, at least 97%, at least 98%, or at least 99% identical to the nucleic acid sequence of SEQ ID NO: 2411.

[0104] In some embodiments, the recombinant nucleic acid comprises a 5′ ITR comprising or consisting of a nucleic acid sequence that is at least 85%, at least 86%, at least 87%, at least 88%, at least 89%, at least 90%, at least 91%, at least 92%, at least 93%, at least 94%, at least 95%, at least 96%, at least 97%, at least 98%, or at least 99% identical to the nucleic acid sequence of SEQ ID NO: 2408; a promoter comprising or consisting of a nucleic acid sequence that is at least 85%, at least 86%, at least 87%, at least 88%, at least 89%, at least 90%, at least 91%, at least 92%, at least 93%, at least 94%, at least 95%, at least 96%, at least 97%, at least 98%, or at least 99% identical to the nucleic acid sequence of SEQ ID NO: 2402; an intron comprising or consisting of a nucleic acid sequence that is at least 85%, at least 86%, at least 87%, at least 88%, at least 89%, at least 90%, at least 91%, at least 92%, at least 93%, at least 94%, at least 95%, at least 96%, at least 97%, at least 98%, or at least 99% identical to the nucleic acid sequence of SEQ ID NO: 2409; a sequence encoding microdystrophin comprising or consisting of a nucleic acid sequence that is at least 85%, at least 86%, at least 87%, at least 88%, at least 89%, at least 90%, at least 91%, at least 92%, at least 93%, at least 94%, at least 95%, at least 96%, at least 97%, at least 98%, or at least 99% identical to the nucleic acid sequence of SEQ ID NO: 2405; a first DRG de-targeting miRNA binding site comprising or consisting of a nucleic acid sequence that is at least 85%, at least 86%, at least 87%, at least 88%, at least 89%, at least 90%, at least 91%, at least 92%, at least 93%, at least 94%, at least 95%, at least 96%, at least 97%, at least 98%, or at least 99% identical to the nucleic acid sequence of SEQ ID NO: 2401; a second DRG de-targeting miRNA binding site comprising or consisting of a nucleic acid sequence that is at least 85%, at least 86%, at least 87%, at least 88%, at least 89%, at least 90%, at least 91%, at least 92%, at least 93%, at least 94%, at least 95%, at least 96%, at least 97%, at least 98%, or at least 99% identical to the nucleic acid sequence of SEQ ID NO: 2401; a PolyA signal comprising or consisting of a nucleic acid sequence that is at least 85%, at least 86%, at least 87%, at least 88%, at least 89%, at least 90%, at least 91%, at least 92%, at least 93%, at least 94%, at least 95%, at least 96%, at least 97%, at least 98%, or at least 99% identical to the nucleic acid sequence of SEQ ID NO: 2410; and a 3′ ITR comprising or consisting of a nucleic acid sequence that is at least 85%, at least 86%, at least 87%, at least 88%, at least 89%, at least 90%, at least 91%, at least 92%, at least 93%, at least 94%, at least 95%, at least 96%, at least 97%, at least 98%, or at least 99% identical to the nucleic acid sequence of SEQ ID NO:

[0105] 2411.

[0106] In some embodiments, the recombinant nucleic acid comprises a 5′ ITR comprising or consisting of a nucleic acid sequence that is at least 85%, at least 86%, at least 87%, at least 88%, at least 89%, at least 90%, at least 91%, at least 92%, at least 93%, at least 94%, at least 95%, at least 96%, at least 97%, at least 98%, or at least 99% identical to the nucleic acid sequence of SEQ ID NO: 2408; a promoter comprising or consisting of a nucleic acid sequence that is at least 85%, at least 86%, at least 87%, at least 88%, at least 89%, at least 90%, at least 91%, at least 92%, at least 93%, at least 94%, at least 95%, at least 96%, at least 97%, at least 98%, or at least 99% identical to the nucleic acid sequence of SEQ ID NO: 2403; an intron comprising or consisting of a nucleic acid sequence that is at least 85%, at least 86%, at least 87%, at least 88%, at least 89%, at least 90%, at least 91%, at least 92%, at least 93%, at least 94%, at least 95%, at least 96%, at least 97%, at least 98%, or at least 99% identical to the nucleic acid sequence of SEQ ID NO: 2409; a sequence encoding microdystrophin comprising or consisting of a nucleic acid sequence that is at least 85%, at least 86%, at least 87%, at least 88%, at least 89%, at least 90%, at least 91%, at least 92%, at least 93%, at least 94%, at least 95%, at least 96%, at least 97%, at least 98%, or at least 99% identical to the nucleic acid sequence of SEQ ID NO: 2405; a first DRG de-targeting miRNA binding site comprising or consisting of a nucleic acid sequence that is at least 85%, at least 86%, at least 87%, at least 88%, at least 89%, at least 90%, at least 91%, at least 92%, at least 93%, at least 94%, at least 95%, at least 96%, at least 97%, at least 98%, or at least 99% identical to the nucleic acid sequence of SEQ ID NO: 2401; a second DRG de-targeting miRNA binding site comprising or consisting of a nucleic acid sequence that is at least 85%, at least 86%, at least 87%, at least 88%, at least 89%, at least 90%, at least 91%, at least 92%, at least 93%, at least 94%, at least 95%, at least 96%, at least 97%, at least 98%, or at least 99% identical to the nucleic acid sequence of SEQ ID NO: 2401; a PolyA signal comprising or consisting of a nucleic acid sequence that is at least 85%, at least 86%, at least 87%, at least 88%, at least 89%, at least 90%, at least 91%, at least 92%, at least 93%, at least 94%, at least 95%, at least 96%, at least 97%, at least 98%, or at least 99% identical to the nucleic acid sequence of SEQ ID NO: 2410; and a 3′ ITR comprising or consisting of a nucleic acid sequence that is at least 85%, at least 86%, at least 87%, at least 88%, at least 89%, at least 90%, at least 91%, at least 92%, at least 93%, at least 94%, at least 95%, at least 96%, at least 97%, at least 98%, or at least 99% identical to the nucleic acid sequence of SEQ ID NO: 2411.

[0107] In some embodiments, the recombinant nucleic acid comprises a 5′ ITR comprising or consisting of a nucleic acid sequence that is at least 85%, at least 86%, at least 87%, at least 88%, at least 89%, at least 90%, at least 91%, at least 92%, at least 93%, at least 94%, at least 95%, at least 96%, at least 97%, at least 98%, or at least 99% identical to the nucleic acid sequence of SEQ ID NO: 2408; a promoter comprising or consisting of a nucleic acid sequence that is at least 85%, at least 86%, at least 87%, at least 88%, at least 89%, at least 90%, at least 91%, at least 92%, at least 93%, at least 94%, at least 95%, at least 96%, at least 97%, at least 98%, or at least 99% identical to the nucleic acid sequence of SEQ ID NO: 2404; an intron comprises or consists of a nucleic acid sequence that is at least 85%, at least 86%, at least 87%, at least 88%, at least 89%, at least 90%, at least 91%, at least 92%, at least 93%, at least 94%, at least 95%, at least 96%, at least 97%, at least 98%, or at least 99% identical to the nucleic acid sequence of SEQ ID NO: 2409; a sequence encoding microdystrophin comprising or consisting of a nucleic acid sequence that is at least 85%, at least 86%, at least 87%, at least 88%, at least 89%, at least 90%, at least 91%, at least 92%, at least 93%, at least 94%, at least 95%, at least 96%, at least 97%, at least 98%, or at least 99% identical to the nucleic acid sequence of SEQ ID NO: 2405; a first DRG de-targeting miRNA binding site comprising or consisting of a nucleic acid sequence that is at least 85%, at least 86%, at least 87%, at least 88%, at least 89%, at least 90%, at least 91%, at least 92%, at least 93%, at least 94%, at least 95%, at least 96%, at least 97%, at least 98%, or at least 99% identical to the nucleic acid sequence of SEQ ID NO: 2401; a second DRG de-targeting miRNA binding site comprising or consisting of a nucleic acid sequence that is at least 85%, at least 86%, at least 87%, at least 88%, at least 89%, at least 90%, at least 91%, at least 92%, at least 93%, at least 94%, at least 95%, at least 96%, at least 97%, at least 98%, or at least 99% identical to the nucleic acid sequence of SEQ ID NO: 2401; a PolyA signal comprising or consisting of a nucleic acid sequence that is at least 85%, at least 86%, at least 87%, at least 88%, at least 89%, at least 90%, at least 91%, at least 92%, at least 93%, at least 94%, at least 95%, at least 96%, at least 97%, at least 98%, or at least 99% identical to the nucleic acid sequence of SEQ ID NO: 2410; and a 3′ ITR comprising or consisting of a nucleic acid sequence that is at least 85%, at least 86%, at least 87%, at least 88%, at least 89%, at least 90%, at least 91%, at least 92%, at least 93%, at least 94%, at least 95%, at least 96%, at least 97%, at least 98%, or at least 99% identical to the nucleic acid sequence of SEQ ID NO: 2411.

[0108] In some embodiments, the recombinant nucleic acid comprises a 5′ ITR comprising or consisting of a nucleic acid sequence that is at least 85%, at least 86%, at least 87%, at least 88%, at least 89%, at least 90%, at least 91%, at least 92%, at least 93%, at least 94%, at least 95%, at least 96%, at least 97%, at least 98%, or at least 99% identical to the nucleic acid sequence of SEQ ID NO: 2408; a promoter comprising or consisting of a nucleic acid sequence that is at least 85%, at least 86%, at least 87%, at least 88%, at least 89%, at least 90%, at least 91%, at least 92%, at least 93%, at least 94%, at least 95%, at least 96%, at least 97%, at least 98%, or at least 99% identical to the nucleic acid sequence of SEQ ID NO:
[0109] 2402; an intron comprises or consists of a nucleic acid sequence that is at least 85%, at least 86%, at least 87%, at least 88%, at least 89%, at least 90%, at least 91%, at least 92%, at least 93%, at least 94%, at least 95%, at least 96%, at least 97%, at least 98%, or at least 99% identical to the nucleic acid sequence of SEQ ID NO: 2409; a sequence encoding microdystrophin comprising or consisting of a nucleic acid sequence that is at least 85%, at least 86%, at least 87%, at least 88%, at least 89%, at least 90%, at least 91%, at least 92%, at least 93%, at least 94%, at least 95%, at least 96%, at least 97%, at least 98%, or at least 99% identical to the nucleic acid sequence of SEQ ID NO: 2406; a first DRG de-targeting miRNA binding site comprising or consisting of a nucleic acid sequence that is at least 85%, at least 86%, at least 87%, at least 88%, at least 89%, at least 90%, at least 91%, at least 92%, at least 93%, at least 94%, at least 95%, at least 96%, at least 97%, at least 98%, or at least 99% identical to the nucleic acid sequence of SEQ ID NO: 2399; a second DRG de-targeting miRNA binding site comprising or consisting of a nucleic acid sequence that is at least 85%, at least 86%, at least 87%, at least 88%, at least 89%, at least 90%, at least 91%, at least 92%, at least 93%, at least 94%, at least 95%, at least 96%, at least 97%, at least 98%, or at least 99% identical to the nucleic acid sequence of SEQ ID NO: 2399; a PolyA signal comprising or consisting of a nucleic acid sequence that is at least 85%, at least 86%, at least 87%, at least 88%, at least 89%, at least 90%, at least 91%, at least 92%, at least 93%, at least 94%, at least 95%, at least 96%, at least 97%, at least 98%, or at least 99% identical to the nucleic acid sequence of SEQ ID NO: 2410; and a 3′ ITR comprising or consisting of a nucleic acid sequence that is at least 85%, at least 86%, at least 87%, at least 88%, at least 89%, at least 90%, at least 91%, at least 92%, at least 93%, at least 94%, at least 95%, at least 96%, at least 97%, at least 98%, or at least 99% identical to the nucleic acid sequence of SEQ ID NO: 2411.

[0110] In some embodiments, the recombinant nucleic acid comprises a 5′ comprising or consisting of a nucleic acid sequence that is at least 85%, at least 86%, at least 87%, at least 88%, at least 89%, at least 90%, at least 91%, at least 92%, at least 93%, at least 94%, at least 95%, at least 96%, at least 97%, at least 98%, or at least 99% identical to the nucleic acid sequence of SEQ ID NO: 2408; a promoter comprising or consisting of a nucleic acid sequence that is at least 85%, at least 86%, at least 87%, at least 88%, at least 89%, at least 90%, at least 91%, at least 92%, at least 93%, at least 94%, at least 95%, at least 96%, at least 97%, at least 98%, or at least 99% identical to the nucleic acid sequence of SEQ ID NO: 2403; an intron comprising or consisting of a nucleic acid sequence that is at least 85%, at least 86%, at least 87%, at least 88%, at least 89%, at least 90%, at least 91%, at least 92%, at least 93%, at least 94%, at least 95%, at least 96%, at least 97%, at least 98%, or at least 99% identical to the nucleic acid sequence of SEQ ID NO: 2409; a sequence encoding microdystrophin comprising or consisting of a nucleic acid sequence that is at least 85%, at least 86%, at least 87%, at least 88%, at least 89%, at least 90%, at least 91%, at least 92%, at least 93%, at least 94%, at least 95%, at least 96%, at least 97%, at least 98%, or at least 99% identical to the nucleic acid sequence of SEQ ID NO: 2406; a first DRG de-targeting miRNA binding site comprising or consisting of a nucleic acid sequence that is at least 85%, at least 86%, at least 87%, at least 88%, at least 89%, at least 90%, at least 91%, at least 92%, at least 93%, at least 94%, at least 95%, at least 96%, at least 97%, at least 98%, or at least 99% identical to the nucleic acid sequence of SEQ ID NO: 2399; a second DRG de-targeting miRNA binding site comprising or consisting of a nucleic acid sequence that is at least 85%, at least 86%, at least 87%, at least 88%, at least 89%, at least 90%, at least 91%, at least 92%, at least 93%, at least 94%, at least 95%, at least 96%, at least 97%, at least 98%, or at least 99% identical to the nucleic acid sequence of SEQ ID NO: 2399; a PolyA signal comprising or consisting of a nucleic acid sequence that is at least 85%, at least 86%, at least 87%, at least 88%, at least 89%, at least 90%, at least 91%, at least 92%, at least 93%, at least 94%, at least 95%, at least 96%, at least 97%, at least 98%, or at least 99% identical to the nucleic acid sequence of SEQ ID NO: 2410; and a 3′ ITR comprising or consisting of a nucleic acid sequence that is at least 85%, at least 86%, at least 87%, at least 88%, at least 89%, at least 90%, at least 91%, at least 92%, at least 93%, at least 94%, at least 95%, at least 96%, at least 97%, at least 98%, or at least 99% identical to the nucleic acid sequence of SEQ ID NO: 2411.

[0111] In some embodiments, the recombinant nucleic acid comprises a 5′ ITR comprising or consisting of a nucleic acid sequence that is at least 85%, at least 86%, at least 87%, at least 88%, at least 89%, at least 90%, at least 91%, at least 92%, at least 93%, at least 94%, at least 95%, at least 96%, at least 97%, at least 98%, or at least 99% identical to the nucleic acid sequence of SEQ ID NO: 2408; a promoter comprising or consisting of a nucleic acid sequence that is at least 85%, at least 86%, at least 87%, at least 88%, at least 89%, at least 90%, at least 91%, at least 92%, at least 93%, at least 94%, at least 95%, at least 96%, at least 97%, at least 98%, or at least 99% identical to the nucleic acid sequence of SEQ ID NO: 2404; an intron comprising or consisting of a nucleic acid sequence that is at least 85%, at least 86%, at least 87%, at least 88%, at least 89%, at least 90%, at least 91%, at least 92%, at least 93%, at least 94%, at least 95%, at least 96%, at least 97%, at least 98%, or at least 99% identical to the nucleic acid sequence of SEQ ID NO: 2409; a sequence encoding microdystrophin comprising or consisting of a nucleic acid sequence that is at least 85%, at least 86%, at least 87%, at least 88%, at least 89%, at least 90%, at least 91%, at least 92%, at least 93%, at least 94%, at least 95%, at least 96%, at least 97%, at least 98%, or at least 99% identical to the nucleic acid sequence of SEQ ID NO: 2406; a first DRG de-targeting miRNA binding site comprising or consisting of a nucleic acid sequence that is at least 85%, at least 86%, at least 87%, at least 88%, at least 89%, at least 90%, at least 91%, at least 92%, at least 93%, at least 94%, at least 95%, at least 96%, at least 97%, at least 98%, or at least 99% identical to the nucleic acid sequence of SEQ ID NO: 2399; a second DRG de-targeting miRNA binding site comprising or consisting of a nucleic acid sequence that is at least 85%, at least 86%, at least 87%, at least 88%, at least 89%, at least 90%, at least 91%, at least 92%, at least 93%, at least 94%, at least 95%, at least 96%, at least 97%, at least 98%, or at least 99% identical to the nucleic acid sequence of SEQ ID NO: 2399; a PolyA signal comprising or consisting of a nucleic acid sequence that is at least 85%, at least 86%, at least 87%, at least 88%, at least 89%, at least 90%, at least 91%, at least 92%, at least 93%, at least 94%, at least 95%, at least 96%, at least 97%, at least 98%, or at least 99% identical to the nucleic acid sequence of SEQ ID NO: 2410; and a 3′ ITR comprising or consisting of a nucleic acid sequence that is at least 85%, at least 86%, at least 87%, at least 88%, at least 89%, at least 90%, at least 91%, at least 92%, at least 93%, at least 94%, at least 95%, at least 96%, at least 97%, at least 98%, or at least 99% identical to the nucleic acid sequence of SEQ ID NO: 2411.

[0112] In some embodiments, the recombinant nucleic acid comprises a 5′ ITR comprising or consisting of a nucleic acid sequence that is at least 85%, at least 86%, at least 87%, at least 88%, at least 89%, at least 90%, at least 91%, at least 92%, at least 93%, at least 94%, at least 95%, at least 96%, at least 97%, at least 98%, or at least 99% identical to the nucleic acid sequence of SEQ ID NO: 2408; a promoter comprising or consisting of a nucleic acid sequence that is at least 85%, at least 86%, at least 87%, at least 88%, at least 89%, at least 90%, at least 91%, at least 92%, at least 93%, at least 94%, at least 95%, at least 96%, at least 97%, at least 98%, or at least 99% identical to the nucleic acid sequence of SEQ ID NO: 2402; an intron comprising or consisting of a nucleic acid sequence that is at least 85%, at least 86%, at least 87%, at least 88%, at least 89%, at least 90%, at least 91%, at least 92%, at least 93%, at least 94%, at least 95%, at least 96%, at least 97%, at least 98%, or at least 99% identical to the nucleic acid sequence of SEQ ID NO: 2409; a sequence encoding microdystrophin comprising or consisting of a nucleic acid sequence that is at least 85%, at least 86%, at least 87%, at least 88%, at least 89%, at least 90%, at least 91%, at least 92%, at least 93%, at least 94%, at least 95%, at least 96%, at least 97%, at least 98%, or at least 99% identical to the nucleic acid sequence of SEQ ID NO: 2406; a first DRG de-targeting miRNA binding site comprising or consisting of a nucleic acid sequence that is at least 85%, at least 86%, at least 87%, at least 88%, at least 89%, at least 90%, at least 91%, at least 92%, at least 93%, at least 94%, at least 95%, at least 96%, at least 97%, at least 98%, or at least 99% identical to the nucleic acid sequence of SEQ ID NO: 2400; a second DRG de-targeting miRNA binding site comprising or consisting of a nucleic acid sequence that is at least 85%, at least 86%, at least 87%, at least 88%, at least 89%, at least 90%, at least 91%, at least 92%, at least 93%, at least 94%, at least 95%, at least 96%, at least 97%, at least 98%, or at least 99% identical to the nucleic acid sequence of SEQ ID NO: 2400; a PolyA signal comprising or consisting of a nucleic acid sequence that is at least 85%, at least 86%, at least 87%, at least 88%, at least 89%, at least 90%, at least 91%, at least 92%, at least 93%, at least 94%, at least 95%, at least 96%, at least 97%, at least 98%, or at least 99% identical to the nucleic acid sequence of SEQ ID NO: 2410; and a 3′ ITR comprising or consisting of a nucleic acid sequence that is at least 85%, at least 86%, at least 87%, at least 88%, at least 89%, at least 90%, at least 91%, at least 92%, at least 93%, at least 94%, at least 95%, at least 96%, at least 97%, at least 98%, or at least 99% identical to the nucleic acid sequence of SEQ ID NO: 2411.

[0113] In some embodiments, the recombinant nucleic acid comprises a 5′ ITR comprising or consisting of a nucleic acid sequence that is at least 85%, at least 86%, at least 87%, at least 88%, at least 89%, at least 90%, at least 91%, at least 92%, at least 93%, at least 94%, at least 95%, at least 96%, at least 97%, at least 98%, or at least 99% identical to the nucleic acid sequence of SEQ ID NO: 2408; a promoter comprising or consisting of a nucleic acid sequence that is at least 85%, at least 86%, at least 87%, at least 88%, at least 89%, at least 90%, at least 91%, at least 92%, at least 93%, at least 94%, at least 95%, at least 96%, at least 97%, at least 98%, or at least 99% identical to the nucleic acid sequence of SEQ ID NO: 2403; an intron comprising or consisting of a nucleic acid sequence that is at least 85%, at least 86%, at least 87%, at least 88%, at least 89%, at least 90%, at least 91%, at least 92%, at least 93%, at least 94%, at least 95%, at least 96%, at least 97%, at least 98%, or at least 99% identical to the nucleic acid sequence of SEQ ID NO: 2409; a sequence encoding microdystrophin comprising or consisting of a nucleic acid sequence that is at least 85%, at least 86%, at least 87%, at least 88%, at least 89%, at least 90%, at least 91%, at least 92%, at least 93%, at least 94%, at least 95%, at least 96%, at least 97%, at least 98%, or at least 99% identical to the nucleic acid sequence of SEQ ID NO: 2406; a first DRG de-targeting miRNA binding site comprising or consisting of a nucleic acid sequence that is at least 85%, at least 86%, at least 87%, at least 88%, at least 89%, at least 90%, at least 91%, at least 92%, at least 93%, at least 94%, at least 95%, at least 96%, at least 97%, at least 98%, or at least 99% identical to the nucleic acid sequence of SEQ ID NO: 2400; a second DRG de-targeting miRNA binding site comprising or consisting of a nucleic acid sequence that is at least 85%, at least 86%, at least 87%, at least 88%, at least 89%, at least 90%, at least 91%, at least 92%, at least 93%, at least 94%, at least 95%, at least 96%, at least 97%, at least 98%, or at least 99% identical to the nucleic acid sequence of SEQ ID NO: 2400; a PolyA signal comprising or consisting of a nucleic acid sequence that is at least 85%, at least 86%, at least 87%, at least 88%, at least 89%, at least 90%, at least 91%, at least 92%, at least 93%, at least 94%, at least 95%, at least 96%, at least 97%, at least 98%, or at least 99% identical to the nucleic acid sequence of SEQ ID NO: 2410; and a 3′ ITR comprising or consisting of a nucleic acid sequence that is at least 85%, at least 86%, at least 87%, at least 88%, at least 89%, at least 90%, at least 91%, at least 92%, at least 93%, at least 94%, at least 95%, at least 96%, at least 97%, at least 98%, or at least 99% identical to the nucleic acid sequence of SEQ ID NO: 2411.

[0114] In some embodiments, the recombinant nucleic acid comprises a 5′ ITR comprising or consisting of a nucleic acid sequence that is at least 85%, at least 86%, at least 87%, at least 88%, at least 89%, at least 90%, at least 91%, at least 92%, at least 93%, at least 94%, at least 95%, at least 96%, at least 97%, at least 98%, or at least 99% identical to the nucleic acid sequence of SEQ ID NO: 2408; a promoter comprising or consisting of a nucleic acid sequence that is at least 85%, at least 86%, at least 87%, at least 88%, at least 89%, at least 90%, at least 91%, at least 92%, at least 93%, at least 94%, at least 95%, at least 96%, at least 97%, at least 98%, or at least 99% identical to the nucleic acid sequence of SEQ ID NO: 2404; an intron comprising or consisting of a nucleic acid sequence that is at least 85%, at least 86%, at least 87%, at least 88%, at least 89%, at least 90%, at least 91%, at least 92%, at least 93%, at least 94%, at least 95%, at least 96%, at least 97%, at least 98%, or at least 99% identical to the nucleic acid sequence of SEQ ID NO: 2409; a sequence encoding microdystrophin comprising or consisting of a nucleic acid sequence that is at least 85%, at least 86%, at least 87%, at least 88%, at least 89%, at least 90%, at least 91%, at least 92%, at least 93%, at least 94%, at least 95%, at least 96%, at least 97%, at least 98%, or at least 99% identical to the nucleic acid sequence of SEQ ID NO: 2406; a first DRG de-targeting miRNA binding site comprising or consisting of a nucleic acid sequence that is at least 85%, at least 86%, at least 87%, at least 88%, at least 89%, at least 90%, at least 91%, at least 92%, at least 93%, at least 94%, at least 95%, at least 96%, at least 97%, at least 98%, or at least 99% identical to the nucleic acid sequence of SEQ ID NO: 2400; a second DRG de-targeting miRNA binding site comprising or consisting of a nucleic acid sequence that is at least 85%, at least 86%, at least 87%, at least 88%, at least 89%, at least 90%, at least 91%, at least 92%, at least 93%, at least 94%, at least 95%, at least 96%, at least 97%, at least 98%, or at least 99% identical to the nucleic acid sequence of SEQ ID NO: 2400; a PolyA signal comprising or consisting of a nucleic acid sequence that is at least 85%, at least 86%, at least 87%, at least 88%, at least 89%, at least 90%, at least 91%, at least 92%, at least 93%, at least 94%, at least 95%, at least 96%, at least 97%, at least 98%, or at least 99% identical to the nucleic acid sequence of SEQ ID NO: 2410; and a 3′ ITR comprising or consisting of a nucleic acid sequence that is at least 85%, at least 86%, at least 87%, at least 88%, at least 89%, at least 90%, at least 91%, at least 92%, at least 93%, at least 94%, at least 95%, at least 96%, at least 97%, at least 98%, or at least 99% identical to the nucleic acid sequence of SEQ ID NO: 2411.

[0115] In some embodiments, the recombinant nucleic acid comprises a 5′ ITR comprising or consisting of a nucleic acid sequence that is at least 85%, at least 86%, at least 87%, at least 88%, at least 89%, at least 90%, at least 91%, at least 92%, at least 93%, at least 94%, at least 95%, at least 96%, at least 97%, at least 98%, or at least 99% identical to the nucleic acid sequence of SEQ ID NO: 2408; a promoter comprising or consisting of a nucleic acid sequence that is at least 85%, at least 86%, at least 87%, at least 88%, at least 89%, at least 90%, at least 91%, at least 92%, at least 93%, at least 94%, at least 95%, at least 96%, at least 97%, at least 98%, or at least 99% identical to the nucleic acid sequence of SEQ ID NO: 2402; an intron comprising or consisting of a nucleic acid sequence that is at least 85%, at least 86%, at least 87%, at least 88%, at least 89%, at least 90%, at least 91%, at least 92%, at least 93%, at least 94%, at least 95%, at least 96%, at least 97%, at least 98%, or at least 99% identical to the nucleic acid sequence of SEQ ID NO: 2409; a sequence encoding microdystrophin comprising or consisting of a nucleic acid sequence that is at least 85%, at least 86%, at least 87%, at least 88%, at least 89%, at least 90%, at least 91%, at least 92%, at least 93%, at least 94%, at least 95%, at least 96%, at least 97%, at least 98%, or at least 99% identical to the nucleic acid sequence of SEQ ID NO: 2406; a first DRG de-targeting miRNA binding site comprising or consisting of a nucleic acid sequence that is at least 85%, at least 86%, at least 87%, at least 88%, at least 89%, at least 90%, at least 91%, at least 92%, at least 93%, at least 94%, at least 95%, at least 96%, at least 97%, at least 98%, or at least 99% identical to the nucleic acid sequence of SEQ ID NO: 2401; a second DRG de-targeting miRNA binding site comprising or consisting of a nucleic acid sequence that is at least 85%, at least 86%, at least 87%, at least 88%, at least 89%, at least 90%, at least 91%, at least 92%, at least 93%, at least 94%, at least 95%, at least 96%, at least 97%, at least 98%, or at least 99% identical to the nucleic acid sequence of SEQ ID NO: 2401; a PolyA signal comprising or consisting of a nucleic acid sequence that is at least 85%, at least 86%, at least 87%, at least 88%, at least 89%, at least 90%, at least 91%, at least 92%, at least 93%, at least 94%, at least 95%, at least 96%, at least 97%, at least 98%, or at least 99% identical to the nucleic acid sequence of SEQ ID NO: 2410; and a 3′ ITR comprising or consisting of a nucleic acid sequence that is at least 85%, at least 86%, at least 87%, at least 88%, at least 89%, at least 90%, at least 91%, at least 92%, at least 93%, at least 94%, at least 95%, at least 96%, at least 97%, at least 98%, or at least 99% identical to the nucleic acid sequence of SEQ ID NO: 2411.

[0116] In some embodiments, the recombinant nucleic acid comprises a 5′ ITR comprising or consisting of a nucleic acid sequence that is at least 85%, at least 86%, at least 87%, at least 88%, at least 89%, at least 90%, at least 91%, at least 92%, at least 93%, at least 94%, at least 95%, at least 96%, at least 97%, at least 98%, or at least 99% identical to the nucleic acid sequence of SEQ ID NO: 2408; a promoter comprising or consisting of a nucleic acid sequence that is at least 85%, at least 86%, at least 87%, at least 88%, at least 89%, at least 90%, at least 91%, at least 92%, at least 93%, at least 94%, at least 95%, at least 96%, at least 97%, at least 98%, or at least 99% identical to the nucleic acid sequence of SEQ ID NO: 2403; an intron comprising or consisting of a nucleic acid sequence that is at least 85%, at least 86%, at least 87%, at least 88%, at least 89%, at least 90%, at least 91%, at least 92%, at least 93%, at least 94%, at least 95%, at least 96%, at least 97%, at least 98%, or at least 99% identical to the nucleic acid sequence of SEQ ID NO: 2409; a sequence encoding microdystrophin comprising or consisting of a nucleic acid sequence that is at least 85%, at least 86%, at least 87%, at least 88%, at least 89%, at least 90%, at least 91%, at least 92%, at least 93%, at least 94%, at least 95%, at least 96%, at least 97%, at least 98%, or at least 99% identical to the nucleic acid sequence of SEQ ID NO: 2406; a first DRG de-targeting miRNA binding site comprising or consisting of a nucleic acid sequence that is at least 85%, at least 86%, at least 87%, at least 88%, at least 89%, at least 90%, at least 91%, at least 92%, at least 93%, at least 94%, at least 95%, at least 96%, at least 97%, at least 98%, or at least 99% identical to the nucleic acid sequence of SEQ ID NO: 2401; a second DRG de-targeting miRNA binding site comprising or consisting of a nucleic acid sequence that is at least 85%, at least 86%, at least 87%, at least 88%, at least 89%, at least 90%, at least 91%, at least 92%, at least 93%, at least 94%, at least 95%, at least 96%, at least 97%, at least 98%, or at least 99% identical to the nucleic acid sequence of SEQ ID NO: 2401; a PolyA signal comprising or consisting of a nucleic acid sequence that is at least 85%, at least 86%, at least 87%, at least 88%, at least 89%, at least 90%, at least 91%, at least 92%, at least 93%, at least 94%, at least 95%, at least 96%, at least 97%, at least 98%, or at least 99% identical to the nucleic acid sequence of SEQ ID NO: 2410; and a 3′ ITR comprising or consisting of a nucleic acid sequence that is at least 85%, at least 86%, at least 87%, at least 88%, at least 89%, at least 90%, at least 91%, at least 92%, at least 93%, at least 94%, at least 95%, at least 96%, at least 97%, at least 98%, or at least 99% identical to the nucleic acid sequence of SEQ ID NO:

[0117] 2411.

[0118] In some embodiments, the recombinant nucleic acid comprises a 5′ ITR comprising or consisting of a nucleic acid sequence that is at least 85%, at least 86%, at least 87%, at least 88%, at least 89%, at least 90%, at least 91%, at least 92%, at least 93%, at least 94%, at least 95%, at least 96%, at least 97%, at least 98%, or at least 99% identical to the nucleic acid sequence of SEQ ID NO: 2408; a promoter comprising or consisting of a nucleic acid sequence that is at least 85%, at least 86%, at least 87%, at least 88%, at least 89%, at least 90%, at least 91%, at least 92%, at least 93%, at least 94%, at least 95%, at least 96%, at least 97%, at least 98%, or at least 99% identical to the nucleic acid sequence of SEQ ID NO: 2404; an intron comprising or consisting of a nucleic acid sequence that is at least 85%, at least 86%, at least 87%, at least 88%, at least 89%, at least 90%, at least 91%, at least 92%, at least 93%, at least 94%, at least 95%, at least 96%, at least 97%, at least 98%, or at least 99% identical to the nucleic acid sequence of SEQ ID NO: 2409; a sequence encoding microdystrophin comprising or consisting of a nucleic acid sequence that is at least 85%, at least 86%, at least 87%, at least 88%, at least 89%, at least 90%, at least 91%, at least 92%, at least 93%, at least 94%, at least 95%, at least 96%, at least 97%, at least 98%, or at least 99% identical to the nucleic acid sequence of SEQ ID NO: 2406; a first DRG de-targeting miRNA binding site comprising or consisting of a nucleic acid sequence that is at least 85%, at least 86%, at least 87%, at least 88%, at least 89%, at least 90%, at least 91%, at least 92%, at least 93%, at least 94%, at least 95%, at least 96%, at least 97%, at least 98%, or at least 99% identical to the nucleic acid sequence of SEQ ID NO: 2401; a second DRG de-targeting miRNA binding site comprising or consisting of a nucleic acid sequence that is at least 85%, at least 86%, at least 87%, at least 88%, at least 89%, at least 90%, at least 91%, at least 92%, at least 93%, at least 94%, at least 95%, at least 96%, at least 97%, at least 98%, or at least 99% identical to the nucleic acid sequence of SEQ ID NO: 2401; a PolyA signal comprising or consisting of a nucleic acid sequence that is at least 85%, at least 86%, at least 87%, at least 88%, at least 89%, at least 90%, at least 91%, at least 92%, at least 93%, at least 94%, at least 95%, at least 96%, at least 97%, at least 98%, or at least 99% identical to the nucleic acid sequence of SEQ ID NO: 2410; and a 3′ ITR comprising or consisting of a nucleic acid sequence that is at least 85%, at least 86%, at least 87%, at least 88%, at least 89%, at least 90%, at least 91%, at least 92%, at least 93%, at least 94%, at least 95%, at least 96%, at least 97%, at least 98%, or at least 99% identical to the nucleic acid sequence of SEQ ID NO: 2411.

[0119] In some embodiments, the recombinant nucleic acid comprises a 5′ ITR comprising or consisting of a nucleic acid sequence that is at least 85%, at least 86%, at least 87%, at least 88%, at least 89%, at least 90%, at least 91%, at least 92%, at least 93%, at least 94%, at least 95%, at least 96%, at least 97%, at least 98%, or at least 99% identical to the nucleic acid sequence of SEQ ID NO: 2408; a promoter comprising or consisting of a nucleic acid sequence that is at least 85%, at least 86%, at least 87%, at least 88%, at least 89%, at least 90%, at least 91%, at least 92%, at least 93%, at least 94%, at least 95%, at least 96%, at least 97%, at least 98%, or at least 99% identical to the nucleic acid sequence of SEQ ID NO: 2402; an intron comprising or consisting of a nucleic acid sequence that is at least 85%, at least 86%, at least 87%, at least 88%, at least 89%, at least 90%, at least 91%, at least 92%, at least 93%, at least 94%, at least 95%, at least 96%, at least 97%, at least 98%, or at least 99% identical to the nucleic acid sequence of SEQ ID NO: 2409; a sequence encoding microdystrophin comprising or consisting of a nucleic acid sequence that is at least 85%, at least 86%, at least 87%, at least 88%, at least 89%, at least 90%, at least 91%, at least 92%, at least 93%, at least 94%, at least 95%, at least 96%, at least 97%, at least 98%, or at least 99% identical to the nucleic acid sequence of SEQ ID NO: 2407; a first DRG de-targeting miRNA binding site comprising or consisting of a nucleic acid sequence that is at least 85%, at least 86%, at least 87%, at least 88%, at least 89%, at least 90%, at least 91%, at least 92%, at least 93%, at least 94%, at least 95%, at least 96%, at least 97%, at least 98%, or at least 99% identical to the nucleic acid sequence of SEQ ID NO: 2399; a second DRG de-targeting miRNA binding site comprising or consisting of a nucleic acid sequence that is at least 85%, at least 86%, at least 87%, at least 88%, at least 89%, at least 90%, at least 91%, at least 92%, at least 93%, at least 94%, at least 95%, at least 96%, at least 97%, at least 98%, or at least 99% identical to the nucleic acid sequence of SEQ ID NO: 2399; a PolyA signal comprising or consisting of a nucleic acid sequence that is at least 85%, at least 86%, at least 87%, at least 88%, at least 89%, at least 90%, at least 91%, at least 92%, at least 93%, at least 94%, at least 95%, at least 96%, at least 97%, at least 98%, or at least 99% identical to the nucleic acid sequence of SEQ ID NO: 2410; and a 3′ ITR comprising or consisting of a nucleic acid sequence that is at least 85%, at least 86%, at least 87%, at least 88%, at least 89%, at least 90%, at least 91%, at least 92%, at least 93%, at least 94%, at least 95%, at least 96%, at least 97%, at least 98%, or at least 99% identical to the nucleic acid sequence of SEQ ID NO: 2411.

[0120] In some embodiments, the recombinant nucleic acid comprises a 5′ ITR comprising or consisting of a nucleic acid sequence that is at least 85%, at least 86%, at least 87%, at least 88%, at least 89%, at least 90%, at least 91%, at least 92%, at least 93%, at least 94%, at least 95%, at least 96%, at least 97%, at least 98%, or at least 99% identical to the nucleic acid sequence of SEQ ID NO: 2408; a promoter comprising or consisting of a nucleic acid sequence that is at least 85%, at least 86%, at least 87%, at least 88%, at least 89%, at least 90%, at least 91%, at least 92%, at least 93%, at least 94%, at least 95%, at least 96%, at least 97%, at least 98%, or at least 99% identical to the nucleic acid sequence of SEQ ID NO:
[0121] 2403; an intron comprising or consisting of a nucleic acid sequence that is at least 85%, at least 86%, at least 87%, at least 88%, at least 89%, at least 90%, at least 91%, at least 92%, at least 93%, at least 94%, at least 95%, at least 96%, at least 97%, at least 98%, or at least 99% identical to the nucleic acid sequence of SEQ ID NO: 2409; a sequence encoding microdystrophin comprising or consisting of a nucleic acid sequence that is at least 85%, at least 86%, at least 87%, at least 88%, at least 89%, at least 90%, at least 91%, at least 92%, at least 93%, at least 94%, at least 95%, at least 96%, at least 97%, at least 98%, or at least 99% identical to the nucleic acid sequence of SEQ ID NO: 2407; a first DRG de-targeting miRNA binding site comprising or consisting of a nucleic acid sequence that is at least 85%, at least 86%, at least 87%, at least 88%, at least 89%, at least 90%, at least 91%, at least 92%, at least 93%, at least 94%, at least 95%, at least 96%, at least 97%, at least 98%, or at least 99% identical to the nucleic acid sequence of SEQ ID NO: 2399; a second DRG de-targeting miRNA binding site comprising or consisting of a nucleic acid sequence that is at least 85%, at least 86%, at least 87%, at least 88%, at least 89%, at least 90%, at least 91%, at least 92%, at least 93%, at least 94%, at least 95%, at least 96%, at least 97%, at least 98%, or at least 99% identical to the nucleic acid sequence of SEQ ID NO: 2399; a PolyA signal comprising or consisting of a nucleic acid sequence that is at least 85%, at least 86%, at least 87%, at least 88%, at least 89%, at least 90%, at least 91%, at least 92%, at least 93%, at least 94%, at least 95%, at least 96%, at least 97%, at least 98%, or at least 99% identical to the nucleic acid sequence of SEQ ID NO: 2410; and a 3′ ITR comprising or consisting of a nucleic acid sequence that is at least 85%, at least 86%, at least 87%, at least 88%, at least 89%, at least 90%, at least 91%, at least 92%, at least 93%, at least 94%, at least 95%, at least 96%, at least 97%, at least 98%, or at least 99% identical to the nucleic acid sequence of SEQ ID NO: 2411.

[0122] In some embodiments, the recombinant nucleic acid comprises a 5′ ITR comprising or consisting of a nucleic acid sequence that is at least 85%, at least 86%, at least 87%, at least 88%, at least 89%, at least 90%, at least 91%, at least 92%, at least 93%, at least 94%, at least 95%, at least 96%, at least 97%, at least 98%, or at least 99% identical to the nucleic acid sequence of SEQ ID NO: 2408; a promoter comprising or consisting of a nucleic acid sequence that is at least 85%, at least 86%, at least 87%, at least 88%, at least 89%, at least 90%, at least 91%, at least 92%, at least 93%, at least 94%, at least 95%, at least 96%, at least 97%, at least 98%, or at least 99% identical to the nucleic acid sequence of SEQ ID NO: 2404; an intron comprising or consisting of a nucleic acid sequence that is at least 85%, at least 86%, at least 87%, at least 88%, at least 89%, at least 90%, at least 91%, at least 92%, at least 93%, at least 94%, at least 95%, at least 96%, at least 97%, at least 98%, or at least 99% identical to the nucleic acid sequence of SEQ ID NO: 2409; a sequence encoding microdystrophin comprising or consisting of a nucleic acid sequence that is at least 85%, at least 86%, at least 87%, at least 88%, at least 89%, at least 90%, at least 91%, at least 92%, at least 93%, at least 94%, at least 95%, at least 96%, at least 97%, at least 98%, or at least 99% identical to the nucleic acid sequence of SEQ ID NO: 2407; a first DRG de-targeting miRNA binding site comprising or consisting of a nucleic acid sequence that is at least 85%, at least 86%, at least 87%, at least 88%, at least 89%, at least 90%, at least 91%, at least 92%, at least 93%, at least 94%, at least 95%, at least 96%, at least 97%, at least 98%, or at least 99% identical to the nucleic acid sequence of SEQ ID NO: 2399; a second DRG de-targeting miRNA binding site comprising or consisting of a nucleic acid sequence that is at least 85%, at least 86%, at least 87%, at least 88%, at least 89%, at least 90%, at least 91%, at least 92%, at least 93%, at least 94%, at least 95%, at least 96%, at least 97%, at least 98%, or at least 99% identical to the nucleic acid sequence of SEQ ID NO: 2399; a PolyA signal comprising or consisting of a nucleic acid sequence that is at least 85%, at least 86%, at least 87%, at least 88%, at least 89%, at least 90%, at least 91%, at least 92%, at least 93%, at least 94%, at least 95%, at least 96%, at least 97%, at least 98%, or at least 99% identical to the nucleic acid sequence of SEQ ID NO: 2410; and a 3′ ITR comprising or consisting of a nucleic acid sequence that is at least 85%, at least 86%, at least 87%, at least 88%, at least 89%, at least 90%, at least 91%, at least 92%, at least 93%, at least 94%, at least 95%, at least 96%, at least 97%, at least 98%, or at least 99% identical to the nucleic acid sequence of SEQ ID NO: 2411.

[0123] In some embodiments, the recombinant nucleic acid comprises a 5′ ITR comprising or consisting of a nucleic acid sequence that is at least 85%, at least 86%, at least 87%, at least 88%, at least 89%, at least 90%, at least 91%, at least 92%, at least 93%, at least 94%, at least 95%, at least 96%, at least 97%, at least 98%, or at least 99% identical to the nucleic acid sequence of SEQ ID NO: 2408; a promoter comprising or consisting of a nucleic acid sequence that is at least 85%, at least 86%, at least 87%, at least 88%, at least 89%, at least 90%, at least 91%, at least 92%, at least 93%, at least 94%, at least 95%, at least 96%, at least 97%, at least 98%, or at least 99% identical to the nucleic acid sequence of SEQ ID NO: 2402; an intron comprising or consisting of a nucleic acid sequence that is at least 85%, at least 86%, at least 87%, at least 88%, at least 89%, at least 90%, at least 91%, at least 92%, at least 93%, at least 94%, at least 95%, at least 96%, at least 97%, at least 98%, or at least 99% identical to the nucleic acid sequence of SEQ ID NO: 2409; a sequence encoding microdystrophin comprising or consisting of a nucleic acid sequence that is at least 85%, at least 86%, at least 87%, at least 88%, at least 89%, at least 90%, at least 91%, at least 92%, at least 93%, at least 94%, at least 95%, at least 96%, at least 97%, at least 98%, or at least 99% identical to the nucleic acid sequence of SEQ ID NO: 2407; a first DRG de-targeting miRNA binding site comprising or consisting of a nucleic acid sequence that is at least 85%, at least 86%, at least 87%, at least 88%, at least 89%, at least 90%, at least 91%, at least 92%, at least 93%, at least 94%, at least 95%, at least 96%, at least 97%, at least 98%, or at least 99% identical to the nucleic acid sequence of SEQ ID NO: 2400; a second DRG de-targeting miRNA binding site comprising or consisting of a nucleic acid sequence that is at least 85%, at least 86%, at least 87%, at least 88%, at least 89%, at least 90%, at least 91%, at least 92%, at least 93%, at least 94%, at least 95%, at least 96%, at least 97%, at least 98%, or at least 99% identical to the nucleic acid sequence of SEQ ID NO: 2400; a PolyA signal comprising or consisting of a nucleic acid sequence that is at least 85%, at least 86%, at least 87%, at least 88%, at least 89%, at least 90%, at least 91%, at least 92%, at least 93%, at least 94%, at least 95%, at least 96%, at least 97%, at least 98%, or at least 99% identical to the nucleic acid sequence of SEQ ID NO: 2410; and a 3′ ITR comprising or consisting of a nucleic acid sequence that is at least 85%, at least 86%, at least 87%, at least 88%, at least 89%, at least 90%, at least 91%, at least 92%, at least 93%, at least 94%, at least 95%, at least 96%, at least 97%, at least 98%, or at least 99% identical to the nucleic acid sequence of SEQ ID NO:

[0124] 2411.

[0125] In some embodiments, the recombinant nucleic acid comprises a 5′ ITR comprising or consisting of a nucleic acid sequence that is at least 85%, at least 86%, at least 87%, at least 88%, at least 89%, at least 90%, at least 91%, at least 92%, at least 93%, at least 94%, at least 95%, at least 96%, at least 97%, at least 98%, or at least 99% identical to the nucleic acid sequence of SEQ ID NO: 2408; a promoter comprising or consisting of a nucleic acid sequence that is at least 85%, at least 86%, at least 87%, at least 88%, at least 89%, at least 90%, at least 91%, at least 92%, at least 93%, at least 94%, at least 95%, at least 96%, at least 97%, at least 98%, or at least 99% identical to the nucleic acid sequence of SEQ ID NO: 2403; an intron comprising or consisting of a nucleic acid sequence that is at least 85%, at least 86%, at least 87%, at least 88%, at least 89%, at least 90%, at least 91%, at least 92%, at least 93%, at least 94%, at least 95%, at least 96%, at least 97%, at least 98%, or at least 99% identical to the nucleic acid sequence of SEQ ID NO: 2409; a sequence encoding microdystrophin comprising or consisting of a nucleic acid sequence that is at least 85%, at least 86%, at least 87%, at least 88%, at least 89%, at least 90%, at least 91%, at least 92%, at least 93%, at least 94%, at least 95%, at least 96%, at least 97%, at least 98%, or at least 99% identical to the nucleic acid sequence of SEQ ID NO: 2407; a first DRG de-targeting miRNA binding site comprising or consisting of a nucleic acid sequence that is at least 85%, at least 86%, at least 87%, at least 88%, at least 89%, at least 90%, at least 91%, at least 92%, at least 93%, at least 94%, at least 95%, at least 96%, at least 97%, at least 98%, or at least 99% identical to the nucleic acid sequence of SEQ ID NO: 2400; a second DRG de-targeting miRNA binding site comprising or consisting of a nucleic acid sequence that is at least 85%, at least 86%, at least 87%, at least 88%, at least 89%, at least 90%, at least 91%, at least 92%, at least 93%, at least 94%, at least 95%, at least 96%, at least 97%, at least 98%, or at least 99% identical to the nucleic acid sequence of SEQ ID NO: 2400; a PolyA signal comprising or consisting of a nucleic acid sequence that is at least 85%, at least 86%, at least 87%, at least 88%, at least 89%, at least 90%, at least 91%, at least 92%, at least 93%, at least 94%, at least 95%, at least 96%, at least 97%, at least 98%, or at least 99% identical to the nucleic acid sequence of SEQ ID NO: 2410; and a 3′ ITR comprising or consisting of a nucleic acid sequence that is at least 85%, at least 86%, at least 87%, at least 88%, at least 89%, at least 90%, at least 91%, at least 92%, at least 93%, at least 94%, at least 95%, at least 96%, at least 97%, at least 98%, or at least 99% identical to the nucleic acid sequence of SEQ ID NO: 2411.

[0126] In some embodiments, the recombinant nucleic acid comprises a 5′ ITR comprising or consisting of a nucleic acid sequence that is at least 85%, at least 86%, at least 87%, at least 88%, at least 89%, at least 90%, at least 91%, at least 92%, at least 93%, at least 94%, at least 95%, at least 96%, at least 97%, at least 98%, or at least 99% identical to the nucleic acid sequence of SEQ ID NO: 2408; a promoter comprising or consisting of a nucleic acid sequence that is at least 85%, at least 86%, at least 87%, at least 88%, at least 89%, at least 90%, at least 91%, at least 92%, at least 93%, at least 94%, at least 95%, at least 96%, at least 97%, at least 98%, or at least 99% identical to the nucleic acid sequence of SEQ ID NO: 2404; an intron comprising or consisting of a nucleic acid sequence that is at least 85%, at least 86%, at least 87%, at least 88%, at least 89%, at least 90%, at least 91%, at least 92%, at least 93%, at least 94%, at least 95%, at least 96%, at least 97%, at least 98%, or at least 99% identical to the nucleic acid sequence of SEQ ID NO: 2409; a sequence encoding microdystrophin comprising or consisting of a nucleic acid sequence that is at least 85%, at least 86%, at least 87%, at least 88%, at least 89%, at least 90%, at least 91%, at least 92%, at least 93%, at least 94%, at least 95%, at least 96%, at least 97%, at least 98%, or at least 99% identical to the nucleic acid sequence of SEQ ID NO: 2407; a first DRG de-targeting miRNA binding site comprising or consisting of a nucleic acid sequence that is at least 85%, at least 86%, at least 87%, at least 88%, at least 89%, at least 90%, at least 91%, at least 92%, at least 93%, at least 94%, at least 95%, at least 96%, at least 97%, at least 98%, or at least 99% identical to the nucleic acid sequence of SEQ ID NO: 2400; a second DRG de-targeting miRNA binding site comprising or consisting of a nucleic acid sequence that is at least 85%, at least 86%, at least 87%, at least 88%, at least 89%, at least 90%, at least 91%, at least 92%, at least 93%, at least 94%, at least 95%, at least 96%, at least 97%, at least 98%, or at least 99% identical to the nucleic acid sequence of SEQ ID NO: 2400; a PolyA signal comprising or consisting of a nucleic acid sequence that is at least 85%, at least 86%, at least 87%, at least 88%, at least 89%, at least 90%, at least 91%, at least 92%, at least 93%, at least 94%, at least 95%, at least 96%, at least 97%, at least 98%, or at least 99% identical to the nucleic acid sequence of SEQ ID NO: 2410; and a 3′ ITR comprising or consisting of a nucleic acid sequence that is at least 85%, at least 86%, at least 87%, at least 88%, at least 89%, at least 90%, at least 91%, at least 92%, at least 93%, at least 94%, at least 95%, at least 96%, at least 97%, at least 98%, or at least 99% identical to the nucleic acid sequence of SEQ ID NO: 2411.

[0127] In some embodiments, the recombinant nucleic acid comprises a 5′ ITR comprising or consisting of a nucleic acid sequence that is at least 85%, at least 86%, at least 87%, at least 88%, at least 89%, at least 90%, at least 91%, at least 92%, at least 93%, at least 94%, at least 95%, at least 96%, at least 97%, at least 98%, or at least 99% identical to the nucleic acid sequence of SEQ ID NO: 2408; a promoter comprising or consisting of a nucleic acid sequence that is at least 85%, at least 86%, at least 87%, at least 88%, at least 89%, at least 90%, at least 91%, at least 92%, at least 93%, at least 94%, at least 95%, at least 96%, at least 97%, at least 98%, or at least 99% identical to the nucleic acid sequence of SEQ ID NO:
[0128] 2402; an intron comprising or consisting of a nucleic acid sequence that is at least 85%, at least 86%, at least 87%, at least 88%, at least 89%, at least 90%, at least 91%, at least 92%, at least 93%, at least 94%, at least 95%, at least 96%, at least 97%, at least 98%, or at least 99% identical to the nucleic acid sequence of SEQ ID NO: 2409; a sequence encoding microdystrophin comprising or consisting of a nucleic acid sequence that is at least 85%, at least 86%, at least 87%, at least 88%, at least 89%, at least 90%, at least 91%, at least 92%, at least 93%, at least 94%, at least 95%, at least 96%, at least 97%, at least 98%, or at least 99% identical to the nucleic acid sequence of SEQ ID NO: 2407; a first DRG de-targeting miRNA binding site comprising or consisting of a nucleic acid sequence that is at least 85%, at least 86%, at least 87%, at least 88%, at least 89%, at least 90%, at least 91%, at least 92%, at least 93%, at least 94%, at least 95%, at least 96%, at least 97%, at least 98%, or at least 99% identical to the nucleic acid sequence of SEQ ID NO: 2401; a second DRG de-targeting miRNA binding site comprising or consisting of a nucleic acid sequence that is at least 85%, at least 86%, at least 87%, at least 88%, at least 89%, at least 90%, at least 91%, at least 92%, at least 93%, at least 94%, at least 95%, at least 96%, at least 97%, at least 98%, or at least 99% identical to the nucleic acid sequence of SEQ ID NO: 2401; a PolyA signal comprising or consisting of a nucleic acid sequence that is at least 85%, at least 86%, at least 87%, at least 88%, at least 89%, at least 90%, at least 91%, at least 92%, at least 93%, at least 94%, at least 95%, at least 96%, at least 97%, at least 98%, or at least 99% identical to the nucleic acid sequence of SEQ ID NO: 2410; and a 3′ ITR comprising or consisting of a nucleic acid sequence that is at least 85%, at least 86%, at least 87%, at least 88%, at least 89%, at least 90%, at least 91%, at least 92%, at least 93%, at least 94%, at least 95%, at least 96%, at least 97%, at least 98%, or at least 99% identical to the nucleic acid sequence of SEQ ID NO: 2411.

[0129] In some embodiments, the recombinant nucleic acid comprises a 5′ ITR comprising or consisting of a nucleic acid sequence that is at least 85%, at least 86%, at least 87%, at least 88%, at least 89%, at least 90%, at least 91%, at least 92%, at least 93%, at least 94%, at least 95%, at least 96%, at least 97%, at least 98%, or at least 99% identical to the nucleic acid sequence of SEQ ID NO: 2408; a promoter comprising or consisting of a nucleic acid sequence that is at least 85%, at least 86%, at least 87%, at least 88%, at least 89%, at least 90%, at least 91%, at least 92%, at least 93%, at least 94%, at least 95%, at least 96%, at least 97%, at least 98%, or at least 99% identical to the nucleic acid sequence of SEQ ID NO: 2403; an intron comprising or consisting of a nucleic acid sequence that is at least 85%, at least 86%, at least 87%, at least 88%, at least 89%, at least 90%, at least 91%, at least 92%, at least 93%, at least 94%, at least 95%, at least 96%, at least 97%, at least 98%, or at least 99% identical to the nucleic acid sequence of SEQ ID NO: 2409; a sequence encoding microdystrophin comprising or consisting of a nucleic acid sequence that is at least 85%, at least 86%, at least 87%, at least 88%, at least 89%, at least 90%, at least 91%, at least 92%, at least 93%, at least 94%, at least 95%, at least 96%, at least 97%, at least 98%, or at least 99% identical to the nucleic acid sequence of SEQ ID NO: 2407; a first DRG de-targeting miRNA binding site comprising or consisting of a nucleic acid sequence that is at least 85%, at least 86%, at least 87%, at least 88%, at least 89%, at least 90%, at least 91%, at least 92%, at least 93%, at least 94%, at least 95%, at least 96%, at least 97%, at least 98%, or at least 99% identical to the nucleic acid sequence of SEQ ID NO: 2401; a second DRG de-targeting miRNA binding site comprising or consisting of a nucleic acid sequence that is at least 85%, at least 86%, at least 87%, at least 88%, at least 89%, at least 90%, at least 91%, at least 92%, at least 93%, at least 94%, at least 95%, at least 96%, at least 97%, at least 98%, or at least 99% identical to the nucleic acid sequence of SEQ ID NO: 2401; a PolyA signal comprising or consisting of a nucleic acid sequence that is at least 85%, at least 86%, at least 87%, at least 88%, at least 89%, at least 90%, at least 91%, at least 92%, at least 93%, at least 94%, at least 95%, at least 96%, at least 97%, at least 98%, or at least 99% identical to the nucleic acid sequence of SEQ ID NO: 2410; and a 3′ ITR comprising or consisting of a nucleic acid sequence that is at least 85%, at least 86%, at least 87%, at least 88%, at least 89%, at least 90%, at least 91%, at least 92%, at least 93%, at least 94%, at least 95%, at least 96%, at least 97%, at least 98%, or at least 99% identical to the nucleic acid sequence of SEQ ID NO: 2411.

[0130] In some embodiments, the recombinant nucleic acid comprises a 5′ ITR comprising or consisting of a nucleic acid sequence that is at least 85%, at least 86%, at least 87%, at least 88%, at least 89%, at least 90%, at least 91%, at least 92%, at least 93%, at least 94%, at least 95%, at least 96%, at least 97%, at least 98%, or at least 99% identical to the nucleic acid sequence of SEQ ID NO: 2408; a promoter comprising or consisting of a nucleic acid sequence that is at least 85%, at least 86%, at least 87%, at least 88%, at least 89%, at least 90%, at least 91%, at least 92%, at least 93%, at least 94%, at least 95%, at least 96%, at least 97%, at least 98%, or at least 99% identical to the nucleic acid sequence of SEQ ID NO: 2404; an intron comprising or consisting of a nucleic acid sequence that is at least 85%, at least 86%, at least 87%, at least 88%, at least 89%, at least 90%, at least 91%, at least 92%, at least 93%, at least 94%, at least 95%, at least 96%, at least 97%, at least 98%, or at least 99% identical to the nucleic acid sequence of SEQ ID NO: 2409; a sequence encoding microdystrophin comprising or consisting of a nucleic acid sequence that is at least 85%, at least 86%, at least 87%, at least 88%, at least 89%, at least 90%, at least 91%, at least 92%, at least 93%, at least 94%, at least 95%, at least 96%, at least 97%, at least 98%, or at least 99% identical to the nucleic acid sequence of SEQ ID NO: 2407; a first DRG de-targeting miRNA binding site comprising or consisting of a nucleic acid sequence that is at least 85%, at least 86%, at least 87%, at least 88%, at least 89%, at least 90%, at least 91%, at least 92%, at least 93%, at least 94%, at least 95%, at least 96%, at least 97%, at least 98%, or at least 99% identical to the nucleic acid sequence of SEQ ID NO: 2401; a second DRG de-targeting miRNA binding site comprising or consisting of a nucleic acid sequence that is at least 85%, at least 86%, at least 87%, at least 88%, at least 89%, at least 90%, at least 91%, at least 92%, at least 93%, at least 94%, at least 95%, at least 96%, at least 97%, at least 98%, or at least 99% identical to the nucleic acid sequence of SEQ ID NO: 2401; a PolyA signal comprising or consisting of a nucleic acid sequence that is at least 85%, at least 86%, at least 87%, at least 88%, at least 89%, at least 90%, at least 91%, at least 92%, at least 93%, at least 94%, at least 95%, at least 96%, at least 97%, at least 98%, or at least 99% identical to the nucleic acid sequence of SEQ ID NO: 2410; and a 3′ ITR comprising or consisting of a nucleic acid sequence that is at least 85%, at least 86%, at least 87%, at least 88%, at least 89%, at least 90%, at least 91%, at least 92%, at least 93%, at least 94%, at least 95%, at least 96%, at least 97%, at least 98%, or at least 99% identical to the nucleic acid sequence of SEQ ID NO:

[0131] 2411.

[0132] In some embodiments, the recombinant nucleic acid comprises a 5′ITR comprising or consisting of the nucleic acid sequence of SEQ ID NO: 2408; a promoter comprising or consisting of the nucleic acid sequence of SEQ ID NO: 2402; an intron comprising or consisting of the nucleic acid sequence of SEQ ID NO: 2409; a sequence encoding microdystrophin comprising or consisting of the nucleic acid sequence of SEQ ID NO: 2405; a first DRG de-targeting miRNA binding site comprising or consisting of the nucleic acid sequence of SEQ ID NO: 2399; a second DRG de-targeting miRNA binding site comprising or consisting of the nucleic acid sequence of SEQ ID NO: 2399; a PolyA signal comprising or consisting of the nucleic acid sequence of SEQ ID NO: 2410; and a 3′ ITR comprising or consisting of the nucleic acid sequence of SEQ ID NO: 2411.

[0133] In some embodiments, the recombinant nucleic acid comprises a 5′ITR comprising or consisting of the nucleic acid sequence of SEQ ID NO: 2408; a promoter comprising or consisting of the nucleic acid sequence of SEQ ID NO: 2403; an intron comprising or consisting of the nucleic acid sequence of SEQ ID NO: 2409; a sequence encoding microdystrophin comprising or consisting of the nucleic acid sequence of SEQ ID NO: 2405; a first DRG de-targeting miRNA binding site comprising or consisting of the nucleic acid sequence of SEQ ID NO: 2399; a second DRG de-targeting miRNA binding site comprising or consisting of the nucleic acid sequence of SEQ ID NO: 2399; a PolyA signal comprising or consisting of the nucleic acid sequence of SEQ ID NO: 2410; and a 3′ ITR comprising or consisting of the nucleic acid sequence of SEQ ID NO: 2411.

[0134] In some embodiments, the recombinant nucleic acid comprises a 5′ ITR comprising or consisting of the nucleic acid sequence of SEQ ID NO: 2408; a promoter comprising or consisting of the nucleic acid sequence of SEQ ID NO: 2404; an intron comprising or consisting of the nucleic acid sequence of SEQ ID NO: 2409; a sequence encoding microdystrophin comprising or consisting of the nucleic acid sequence of SEQ ID NO: 2405; a first DRG de-targeting miRNA binding site comprising or consisting of the nucleic acid sequence of SEQ ID NO: 2399; a second DRG de-targeting miRNA binding site comprising or consisting of the nucleic acid sequence of SEQ ID NO: 2399; a PolyA signal comprising or consisting of the nucleic acid sequence of SEQ ID NO: 2410; and a 3′ ITR comprising or consisting of the nucleic acid sequence of SEQ ID NO: 2411.

[0135] In some embodiments, the recombinant nucleic acid comprises a 5′ ITR comprising or consisting of the nucleic acid sequence of SEQ ID NO: 2408; a promoter comprising or consisting of the nucleic acid sequence of SEQ ID NO: 2402; an intron comprises or consists of the nucleic acid sequence of SEQ ID NO: 2409; a sequence encoding microdystrophin comprising or consisting of the nucleic acid sequence of SEQ ID NO: 2405; a first DRG de-targeting miRNA binding site comprising or consisting of the nucleic acid sequence of SEQ ID NO: 2400; a second DRG de-targeting miRNA binding site comprising or consisting of the nucleic acid sequence of SEQ ID NO: 2400; a PolyA signal comprising or consisting of the nucleic acid sequence of SEQ ID NO: 2410; and a 3′ ITR comprising or consisting of the nucleic acid sequence of SEQ ID NO: 2411.

[0136] In some embodiments, the recombinant nucleic acid comprises a 5′ ITR comprising or consisting of the nucleic acid sequence of SEQ ID NO: 2408; a promoter comprising or consisting of the nucleic acid sequence of SEQ ID NO: 2403; an intron comprising or consisting of the nucleic acid sequence of SEQ ID NO: 2409; a sequence encoding microdystrophin comprising or consisting of the nucleic acid sequence of SEQ ID NO: 2405; a first DRG de-targeting miRNA binding site comprising or consisting of the nucleic acid sequence of SEQ ID NO: 2400; a second DRG de-targeting miRNA binding site comprising or consisting of the nucleic acid sequence of SEQ ID NO: 2400; a PolyA signal comprising or consisting of the nucleic acid sequence of SEQ ID NO: 2410; and a 3′ ITR comprising or consisting of the nucleic acid sequence of SEQ ID NO: 2411.

[0137] In some embodiments, the recombinant nucleic acid comprises a 5′ ITR comprising or consisting of the nucleic acid sequence of SEQ ID NO: 2408; a promoter comprising or consisting of the nucleic acid sequence of SEQ ID NO: 2404; an intron comprises or consists of the nucleic acid sequence of SEQ ID NO: 2409; a sequence encoding microdystrophin comprising or consisting of the nucleic acid sequence of SEQ ID NO: 2405; a first DRG de-targeting miRNA binding site comprising or consisting of the nucleic acid sequence of SEQ ID NO: 2400; a second DRG de-targeting miRNA binding site comprising or consisting of the nucleic acid sequence of SEQ ID NO: 2400; a PolyA signal comprising or consisting of the nucleic acid sequence of SEQ ID NO: 2410; and a 3′ ITR comprising or consisting of the nucleic acid sequence of SEQ ID NO: 2411.

[0138] In some embodiments, the recombinant nucleic acid comprises a 5′ ITR comprising or consisting of the nucleic acid sequence of SEQ ID NO: 2408; a promoter comprising or consisting of the nucleic acid sequence of SEQ ID NO: 2402; an intron comprising or consisting of the nucleic acid sequence of SEQ ID NO: 2409; a sequence encoding microdystrophin comprising or consisting of the nucleic acid sequence of SEQ ID NO: 2405; a first DRG de-targeting miRNA binding site comprising or consisting of the nucleic acid sequence of SEQ ID NO: 2401; a first DRG de-targeting miRNA binding site comprising or consisting of the nucleic acid sequence of SEQ ID NO: 2401; a PolyA signal comprising or consisting of the nucleic acid sequence of SEQ ID NO: 2410; and a 3′ ITR comprising or consisting of the nucleic acid sequence of SEQ ID NO: 2411.

[0139] In some embodiments, the recombinant nucleic acid comprises a 5′ITR comprising or consisting of the nucleic acid sequence of SEQ ID NO: 2408; a promoter comprising or consisting of the nucleic acid sequence of SEQ ID NO: 2403; an intron comprising or consisting of the nucleic acid sequence of SEQ ID NO: 2409; a sequence encoding microdystrophin comprising or consisting of the nucleic acid sequence of SEQ ID NO: 2405; a first DRG de-targeting miRNA binding site comprising or consisting of the nucleic acid sequence of SEQ ID NO: 2401; a second DRG de-targeting miRNA binding site comprising or consisting of the nucleic acid sequence of SEQ ID NO: 2401; a PolyA signal comprising or consisting of the nucleic acid sequence of SEQ ID NO: 2410; and a 3′ ITR comprising or consisting of the nucleic acid sequence of SEQ ID NO: 2411.

[0140] In some embodiments, the recombinant nucleic acid comprises a 5′ITR comprising or consisting of the nucleic acid sequence of SEQ ID NO: 2408; a promoter comprising or consisting of the nucleic acid sequence of SEQ ID NO: 2404; an intron comprises or consists of the nucleic acid sequence of SEQ ID NO: 2409; a sequence encoding microdystrophin comprising or consisting of the nucleic acid sequence of SEQ ID NO: 2405; a first DRG de-targeting miRNA binding site comprising or consisting of the nucleic acid sequence of SEQ ID NO: 2401; a second DRG de-targeting miRNA binding site comprising or consisting of the nucleic acid sequence of SEQ ID NO: 2401; a PolyA signal comprising or consisting of the nucleic acid sequence of SEQ ID NO: 2410; and a 3′ ITR comprising or consisting of the nucleic acid sequence of SEQ ID NO: 2411.

[0141] In some embodiments, the recombinant nucleic acid comprises a 5′ ITR comprising or consisting of the nucleic acid sequence of SEQ ID NO: 2408; a promoter comprising or consisting of the nucleic acid sequence of SEQ ID NO: 2402; an intron comprises or consists of the nucleic acid sequence of SEQ ID NO: 2409; a sequence encoding microdystrophin comprising or consisting of the nucleic acid sequence of SEQ ID NO: 2406; a first DRG de-targeting miRNA binding site comprising or consisting of the nucleic acid sequence of SEQ ID NO: 2399; a second DRG de-targeting miRNA binding site comprising or consisting of the nucleic acid sequence of SEQ ID NO: 2399; a PolyA signal comprising or consisting of the nucleic acid sequence of SEQ ID NO: 2410; and a 3′ ITR comprising or consisting of the nucleic acid sequence of SEQ ID NO: 2411.

[0142] In some embodiments, the recombinant nucleic acid comprises a 5′ comprising or consisting of the nucleic acid sequence of SEQ ID NO: 2408; a promoter comprising or consisting of the nucleic acid sequence of SEQ ID NO: 2403; an intron comprising or consisting of the nucleic acid sequence of SEQ ID NO: 2409; a sequence encoding microdystrophin comprising or consisting of the nucleic acid sequence of SEQ ID NO: 2406; a first DRG de-targeting miRNA binding site comprising or consisting of the nucleic acid sequence of SEQ ID NO: 2399; a second DRG de-targeting miRNA binding site comprising or consisting of the nucleic acid sequence of SEQ ID NO: 2399; a PolyA signal comprising or consisting of the nucleic acid sequence of SEQ ID NO: 2410; and a 3′ ITR comprising or consisting of the nucleic acid sequence of SEQ ID NO: 2411.

[0143] In some embodiments, the recombinant nucleic acid comprises a 5′ ITR comprising or consisting of the nucleic acid sequence of SEQ ID NO: 2408; a promoter comprising or consisting of the nucleic acid sequence of SEQ ID NO: 2404; an intron comprising or consisting of the nucleic acid sequence of SEQ ID NO: 2409; a sequence encoding microdystrophin comprising or consisting of the nucleic acid sequence of SEQ ID NO: 2406; a first DRG de-targeting miRNA binding site comprising or consisting of the nucleic acid sequence of SEQ ID NO: 2399; a second DRG de-targeting miRNA binding site comprising or consisting of the nucleic acid sequence of SEQ ID NO: 2399; a PolyA signal comprising or consisting of the nucleic acid sequence of SEQ ID NO: 2410; and a 3′ ITR comprising or consisting of the nucleic acid sequence of SEQ ID NO: 2411.

[0144] In some embodiments, the recombinant nucleic acid comprises a 5′ ITR comprising or consisting of the nucleic acid sequence of SEQ ID NO: 2408; a promoter comprising or consisting of the nucleic acid sequence of SEQ ID NO: 2402; an intron comprising or consisting of the nucleic acid sequence of SEQ ID NO: 2409; a sequence encoding microdystrophin comprising or consisting of the nucleic acid sequence of SEQ ID NO: 2406; a first DRG de-targeting miRNA binding site comprising or consisting of the nucleic acid sequence of SEQ ID NO: 2400; a second DRG de-targeting miRNA binding site comprising or consisting of the nucleic acid sequence of SEQ ID NO: 2400; a PolyA signal comprising or consisting of the nucleic acid sequence of SEQ ID NO: 2410; and a 3′ ITR comprising or consisting of the nucleic acid sequence of SEQ ID NO: 2411.

[0145] In some embodiments, the recombinant nucleic acid comprises a 5′ ITR comprising or consisting of the nucleic acid sequence of SEQ ID NO: 2408; a promoter comprising or consisting of the nucleic acid sequence of SEQ ID NO: 2403; an intron comprising or consisting of the nucleic acid sequence of SEQ ID NO: 2409; a sequence encoding microdystrophin comprising or consisting of the nucleic acid sequence of SEQ ID NO: 2406; a first DRG de-targeting miRNA binding site comprising or consisting of the nucleic acid sequence of SEQ ID NO: 2400; a second DRG de-targeting miRNA binding site comprising or consisting of the nucleic acid sequence of SEQ ID NO: 2400; a PolyA signal comprising or consisting of the nucleic acid sequence of SEQ ID NO: 2410; and a 3′ ITR comprising or consisting of the nucleic acid sequence of SEQ ID NO: 2411.

[0146] In some embodiments, the recombinant nucleic acid comprises a 5′ ITR comprising or consisting of the nucleic acid sequence of SEQ ID NO: 2408; a promoter comprising or consisting of the nucleic acid sequence of SEQ ID NO: 2404; an intron comprising or consisting of the nucleic acid sequence of SEQ ID NO: 2409; a sequence encoding microdystrophin comprising or consisting of the nucleic acid sequence of SEQ ID NO: 2406; a first DRG de-targeting miRNA binding site comprising or consisting of the nucleic acid sequence of SEQ ID NO: 2400; a second DRG de-targeting miRNA binding site comprising or consisting of the nucleic acid sequence of SEQ ID NO: 2400; a PolyA signal comprising or consisting of the nucleic acid sequence of SEQ ID NO: 2410; and a 3′ ITR comprising or consisting of the nucleic acid sequence of SEQ ID NO: 2411.

[0147] In some embodiments, the recombinant nucleic acid comprises a 5′ ITR comprising or consisting of the nucleic acid sequence of SEQ ID NO: 2408; a promoter comprising or consisting of the nucleic acid sequence of SEQ ID NO: 2402; an intron comprising or consisting of the nucleic acid sequence of SEQ ID NO: 2409; a sequence encoding microdystrophin comprising or consisting of the nucleic acid sequence of SEQ ID NO: 2406; a first DRG de-targeting miRNA binding site comprising or consisting of the nucleic acid sequence of SEQ ID NO: 2401; a second DRG de-targeting miRNA binding site comprising or consisting of the nucleic acid sequence of SEQ ID NO: 2401; a PolyA signal comprising or consisting of the nucleic acid sequence of SEQ ID NO: 2410; and a 3′ ITR comprising or consisting of the nucleic acid sequence of SEQ ID NO: 2411.

[0148] In some embodiments, the recombinant nucleic acid comprises a 5′ ITR comprising or consisting of the nucleic acid sequence of SEQ ID NO: 2408; a promoter comprising or consisting of the nucleic acid sequence of SEQ ID NO: 2403; an intron comprising or consisting of the nucleic acid sequence of SEQ ID NO: 2409; a sequence encoding microdystrophin comprising or consisting of the nucleic acid sequence of SEQ ID NO: 2406; a first DRG de-targeting miRNA binding site comprising or consisting of the nucleic acid sequence of SEQ ID NO: 2401; a second DRG de-targeting miRNA binding site comprising or consisting of the nucleic acid sequence of SEQ ID NO: 2401; a PolyA signal comprising or consisting of the nucleic acid sequence of SEQ ID NO: 2410; and a 3′ ITR comprising or consisting of the nucleic acid sequence of SEQ ID NO: 2411.

[0149] In some embodiments, the recombinant nucleic acid comprises a 5′ ITR comprising or consisting of the nucleic acid sequence of SEQ ID NO: 2408; a promoter comprising or consisting of the nucleic acid sequence of SEQ ID NO: 2404; an intron comprising or consisting of the nucleic acid sequence of SEQ ID NO: 2409; a sequence encoding microdystrophin comprising or consisting of the nucleic acid sequence of SEQ ID NO: 2406; a first DRG de-targeting miRNA binding site comprising or consisting of the nucleic acid sequence of SEQ ID NO: 2401; a second DRG de-targeting miRNA binding site comprising or consisting of the nucleic acid sequence of SEQ ID NO: 2401; a PolyA signal comprising or consisting of the nucleic acid sequence of SEQ ID NO: 2410; and a 3′ ITR comprising or consisting of the nucleic acid sequence of SEQ ID NO: 2411.

[0150] In some embodiments, the recombinant nucleic acid comprises a 5′ITR comprising or consisting of the nucleic acid sequence of SEQ ID NO: 2408; a promoter comprising or consisting of the nucleic acid sequence of SEQ ID NO: 2402; an intron comprising or consisting of the nucleic acid sequence of SEQ ID NO: 2409; a sequence encoding microdystrophin comprising or consisting of the nucleic acid sequence of SEQ ID NO: 2407; a first DRG de-targeting miRNA binding site comprising or consisting of the nucleic acid sequence of SEQ ID NO: 2399; a second DRG de-targeting miRNA binding site comprising or consisting of the nucleic acid sequence of SEQ ID NO: 2399; a PolyA signal comprising or consisting of the nucleic acid sequence of SEQ ID NO: 2410; and a 3′ ITR comprising or consisting of the nucleic acid sequence of SEQ ID NO: 2411.

[0151] In some embodiments, the recombinant nucleic acid comprises a 5′ ITR comprising or consisting of the nucleic acid sequence of SEQ ID NO: 2408; a promoter comprising or consisting of the nucleic acid sequence of SEQ ID NO: 2403; an intron comprising or consisting of the nucleic acid sequence of SEQ ID NO: 2409; a sequence encoding microdystrophin comprising or consisting of the nucleic acid sequence of SEQ ID NO: 2407; a first DRG de-targeting miRNA binding site comprising or consisting of the nucleic acid sequence of SEQ ID NO: 2399; a second DRG de-targeting miRNA binding site comprising or consisting of the nucleic acid sequence of SEQ ID NO: 2399; a PolyA signal comprising or consisting of the nucleic acid sequence of SEQ ID NO: 2410; and a 3′ ITR comprising or consisting of the nucleic acid sequence of SEQ ID NO: 2411.

[0152] In some embodiments, the recombinant nucleic acid comprises a 5′ ITR comprising or consisting of the nucleic acid sequence of SEQ ID NO: 2408; a promoter comprising or consisting of the nucleic acid sequence of SEQ ID NO: 2404; an intron comprising or consisting of the nucleic acid sequence of SEQ ID NO: 2409; a sequence encoding microdystrophin comprising or consisting of the nucleic acid sequence of SEQ ID NO: 2407; a first DRG de-targeting miRNA binding site comprising or consisting of the nucleic acid sequence of SEQ ID NO: 2399; a second DRG de-targeting miRNA binding site comprising or consisting of the nucleic acid sequence of SEQ ID NO: 2399; a PolyA signal comprising or consisting of the nucleic acid sequence of SEQ ID NO: 2410; and a 3′ ITR comprising or consisting of the nucleic acid sequence of SEQ ID NO: 2411.

[0153] In some embodiments, the recombinant nucleic acid comprises a 5′ ITR comprising or consisting of the nucleic acid sequence of SEQ ID NO: 2408; a promoter comprising or consisting of the nucleic acid sequence of SEQ ID NO: 2402; an intron comprising or consisting of the nucleic acid sequence of SEQ ID NO: 2409; a sequence encoding microdystrophin comprising or consisting of the nucleic acid sequence of SEQ ID NO: 2407; a first DRG de-targeting miRNA binding site comprising or consisting of the nucleic acid sequence of SEQ ID NO: 2400; a second DRG de-targeting miRNA binding site comprising or consisting of the nucleic acid sequence of SEQ ID NO: 2400; a PolyA signal comprising or consisting of the nucleic acid sequence of SEQ ID NO: 2410; and a 3′ ITR comprising or consisting of the nucleic acid sequence of SEQ ID NO: 2411.

[0154] In some embodiments, the recombinant nucleic acid comprises a 5′ ITR comprising or consisting of the nucleic acid sequence of SEQ ID NO: 2408; a promoter comprising or consisting of the nucleic acid sequence of SEQ ID NO: 2403; an intron comprising or consisting of the nucleic acid sequence of SEQ ID NO: 2409; a sequence encoding microdystrophin comprising or consisting of the nucleic acid sequence of SEQ ID NO: 2407; a first DRG de-targeting miRNA binding site comprising or consisting of the nucleic acid sequence of SEQ ID NO: 2400; a second DRG de-targeting miRNA binding site comprising or consisting of the nucleic acid sequence of SEQ ID NO: 2400; a PolyA signal comprising or consisting of the nucleic acid sequence of SEQ ID NO: 2410; and the 3′ ITR comprising or consisting of a nucleic acid sequence of SEQ ID NO: 2411.

[0155] In some embodiments, the recombinant nucleic acid comprises a 5′ ITR comprising or consisting of the nucleic acid sequence of SEQ ID NO: 2408; a promoter comprising or consisting of the nucleic acid sequence of SEQ ID NO: 2404; an intron comprising or consisting of the nucleic acid sequence of SEQ ID NO: 2409; a sequence encoding microdystrophin comprising or consisting of the nucleic acid sequence of SEQ ID NO: 2407; a first DRG de-targeting miRNA binding site comprising or consisting of the nucleic acid sequence of SEQ ID NO: 2400; a second DRG de-targeting miRNA binding site comprising or consisting of the nucleic acid sequence of SEQ ID NO: 2400; a PolyA signal comprising or consisting of the nucleic acid sequence of SEQ ID NO: 2410; and a 3′ ITR comprising or consisting of the nucleic acid sequence of SEQ ID NO: 2411.

[0156] In some embodiments, the recombinant nucleic acid comprises a 5′ ITR comprising or consisting of the nucleic acid sequence of SEQ ID NO: 2408; a promoter comprising or consisting of the nucleic acid sequence of SEQ ID NO: 2402; an intron comprising or consisting of the nucleic acid sequence of SEQ ID NO: 2409; a sequence encoding microdystrophin comprising or consisting of the nucleic acid sequence of SEQ ID NO: 2407; a first DRG de-targeting miRNA binding site comprising or consisting of the nucleic acid sequence of SEQ ID NO: 2401; a second DRG de-targeting miRNA binding site comprising or consisting of the nucleic acid sequence of SEQ ID NO: 2401; a PolyA signal comprising or consisting of the nucleic acid sequence of SEQ ID NO: 2410; and a 3′ ITR comprising or consisting of the nucleic acid sequence of SEQ ID NO: 2411.

[0157] In some embodiments, the recombinant nucleic acid comprises a 5′ ITR comprising or consisting of the nucleic acid sequence of SEQ ID NO: 2408; a promoter comprising or consisting of the nucleic acid sequence of SEQ ID NO: 2403; an intron comprising or consisting of the nucleic acid sequence of SEQ ID NO: 2409; a sequence encoding microdystrophin comprising or consisting of the nucleic acid sequence of SEQ ID NO: 2407; a first DRG de-targeting miRNA binding site comprising or consisting of the nucleic acid sequence of SEQ ID NO: 2401; a second DRG de-targeting miRNA binding site comprising or consisting of the nucleic acid sequence of SEQ ID NO: 2401; a PolyA signal comprising or consisting of the nucleic acid sequence of SEQ ID NO: 2410; and a 3′ ITR comprising or consisting of the nucleic acid sequence of SEQ ID NO: 2411.

[0158] In some embodiments, the recombinant nucleic acid comprises a 5′ ITR comprising or consisting of the nucleic acid sequence of SEQ ID NO: 2408; a promoter comprising or consisting of the nucleic acid sequence of SEQ ID NO: 2404; an intron comprising or consisting of the nucleic acid sequence of SEQ ID NO: 2409; a sequence encoding microdystrophin comprising or consisting of the nucleic acid sequence of SEQ ID NO: 2407; a first DRG de-targeting miRNA binding site comprising or consisting of the nucleic acid sequence of SEQ ID NO: 2401; a second DRG de-targeting miRNA binding site comprising or consisting of the nucleic acid sequence of SEQ ID NO: 2401; a PolyA signal comprising or consisting of the nucleic acid sequence of SEQ ID NO: 2410; and a 3′ ITR comprising or consisting of the nucleic acid sequence of SEQ ID NO: 2411.

[0159] In some embodiments, the recombinant nucleic acid comprises or consists of a nucleic acid sequence that is at least 85%, at least 86%, at least 87%, at least 88%, at least 89%, at least 90%, at least 91%, at least 92%, at least 93%, at least 94%, at least 95%, at least 96%, at least 97%, at least 98%, or at least 99% identical to the nucleic acid sequence of any one of SEQ ID NOs: 2412-2438. In some embodiments, the recombinant nucleic acid comprises or consists of the nucleic acid sequence of any one of SEQ ID NOs: 2412-2438.

[0160] In some embodiments, the recombinant nucleic acid comprises or consists of the nucleic acid sequence of SEQ ID NO: 2412. In some embodiments, the recombinant nucleic acid comprises or consists of the nucleic acid sequence of SEQ ID NO: 2413. In some embodiments, the recombinant nucleic acid comprises or consists of the nucleic acid sequence of SEQ ID NO: 2414. In some embodiments, the recombinant nucleic acid comprises or consists of the nucleic acid sequence of SEQ ID NO: 2415. In some embodiments, the recombinant nucleic acid comprises or consists of the nucleic acid sequence of SEQ ID NO: 2416. In some embodiments, the recombinant nucleic acid comprises or consists of the nucleic acid sequence of SEQ ID NO: 2417. In some embodiments, the recombinant nucleic acid comprises or consists of the nucleic acid sequence of SEQ ID NO: 2418. In some embodiments, the recombinant nucleic acid comprises or consists of the nucleic acid sequence of SEQ ID NO: 2419. In some embodiments, the recombinant nucleic acid comprises or consists of the nucleic acid sequence of SEQ ID NO: 2420. In some embodiments, the recombinant nucleic acid comprises or consists of the nucleic acid sequence of SEQ ID NO: 2421. In some embodiments, the recombinant nucleic acid comprises or consists of the nucleic acid sequence of SEQ ID NO: 2422. In some embodiments, the recombinant nucleic acid comprises or consists of the nucleic acid sequence of SEQ ID NO: 2423. In some embodiments, the recombinant nucleic acid comprises or consists of the nucleic acid sequence of SEQ ID NO: 2424. In some embodiments, the recombinant nucleic acid comprises or consists of the nucleic acid sequence of SEQ ID NO: 2425. In some embodiments, the recombinant nucleic acid comprises or consists of the nucleic acid sequence of SEQ ID NO: 2426. In some embodiments, the recombinant nucleic acid comprises or consists of the nucleic acid sequence of SEQ ID NO: 2427. In some embodiments, the recombinant nucleic acid comprises or consists of the nucleic acid sequence of SEQ ID NO: 2428. In some embodiments, the recombinant nucleic acid comprises or consists of the nucleic acid sequence of SEQ ID NO: 2429. In some embodiments, the recombinant nucleic acid comprises or consists of the nucleic acid sequence of SEQ ID NO: 2430. In some embodiments, the recombinant nucleic acid comprises or consists of the nucleic acid sequence of SEQ ID NO: 2431. In some embodiments, the recombinant nucleic acid comprises or consists of the nucleic acid sequence of SEQ ID NO: 2432. In some embodiments, the recombinant nucleic acid comprises or consists of the nucleic acid sequence of SEQ ID NO: 2433. In some embodiments, the recombinant nucleic acid comprises or consists of the nucleic acid sequence of SEQ ID NO: 2434. In some embodiments, the recombinant nucleic acid comprises or consists of the nucleic acid sequence of SEQ ID NO: 2435. In some embodiments, the recombinant nucleic acid comprises or consists of the nucleic acid sequence of SEQ ID NO: 2436. In some embodiments, the recombinant nucleic acid comprises or consists of the nucleic acid sequence of SEQ ID NO: 2437. In some embodiments, the recombinant nucleic acid comprises or consists of the nucleic acid sequence of SEQ ID NO: 2438.

[0161] Aspects of the present disclosure provide a promoter comprising or consisting of a nucleic acid sequence that is at least 85%, at least 86%, at least 87%, at least 88%, at least 89%, at least 90%, at least 91%, at least 92%, at least 93%, at least 94%, at least 95%, at least 96%, at least 97%, at least 98%, or at least 99% identical to the nucleic acid sequence of any one of SEQ ID NOs: 2402-2404. In some embodiments, the promoter comprises or consists of the nucleic acid sequence of any one of SEQ ID NOs: 2402-2404. In some embodiments, the promoter comprises or consists of the nucleic acid sequence of SEQ ID NO: 2402. In some embodiments, the promoter comprises or consists of the nucleic acid sequence of SEQ ID NO: 2403. In some embodiments, the promoter comprises or consists of the nucleic acid sequence of SEQ ID NO: 2404. In some embodiments, the recombinant nucleic acid comprising the promoter exhibits enhanced expression in skeletal muscle cells and/or cardiac muscle cells compared to non-skeletal muscle cells and/or non-cardiac muscle cells.

[0162] Aspects of the present disclosure provide a recombinant nucleic acid comprising a codon optimized sequence encoding microdystrophin that is at least 85%, at least 86%, at least 87%, at least 88%, at least 89%, at least 90%, at least 91%, at least 92%, at least 93%, at least 94%, at least 95%, at least 96%, at least 97%, at least 98%, or at least 99% identical to the nucleic acid sequence of any one of SEQ ID NOs: 2405-2407. In some embodiments, the codon optimized sequence encoding microdystrophin comprises or consists of the nucleic acid sequence of any one of SEQ ID NOs: 2405-2407. In some embodiments, the codon optimized sequence encoding microdystrophin comprises or consists of the nucleic acid sequence of SEQ ID NO: 2405. In some embodiments, the codon optimized sequence encoding microdystrophin comprises or consists of the nucleic acid sequence of SEQ ID NO: 2406. In some embodiments, the codon optimized sequence encoding microdystrophin comprises or consists of the nucleic acid sequence of SEQ ID NO: 2407.

[0163] Aspects of the present disclosure provide an adeno-associated virus (AAV) particle comprising any one of the recombinant nucleic acids described herein and a capsid protein. In some embodiments, the capsid protein is derived from a serotype selected from AAV1, AAV2, AAV3, AAV4, AAV5, AAV6, AAV6.2, AAV7, AAV8, AAV9, AAV10, AAV11, AAV12, AAV13, AAVrh, AAVrh10, AAVrh74, AAV-DJ, AAV-DJ/8, Anc80, and AAV7m8, or a derivative, hybrid or chimeric serotype thereof.

[0164] In some embodiments, the AAV particle has increased muscle tropism compared to a wild type AAV9 particle. In some embodiments, the AAV particle has reduced liver tropism compared to a wild type AAV9 particle.

[0165] In some embodiments, the capsid protein comprises an amino acid sequence of formula (I): X₁NX₂X₃X₄RGDRX₅X₆L (formula I; SEQ ID NO: 1), wherein each of X₁-X₆ is any amino acid.

[0166] In some embodiments, the amino acid sequence of formula (I) is in a hypervariable region IV (HVR IV) relative to a wild type AAV9 capsid. In some embodiments, relative to a wild type AAV9 capsid, X₁ is a substitution at amino acid 451, X₂ is a substitution at amino acid 453, X₃ is a substitution at amino acid 454, X₄ is a substitution at amino acid 455, and RGDRX₅X₆L (SEQ ID NO: 2441) is inserted after amino acid 455. In some embodiments, X₁ is A, I, F, G, H, L, M, Q, S, T, or V; X₂ is A, G, S, T, or Y; X₃ is S, N, G, or P; X₄ is A, G, H, I, M, S, T, or V; X₅ is A, G, or Q; and X₆ is A, I, L, M, N, S, or Y. In some embodiments, the amino acid sequence of formula (I) comprises of any one of SEQ ID NOs: 801-1599. In some embodiments, the amino acid sequence of formula (I) comprises of any one of SEQ ID NOs: 1600-2398. In some embodiments, the amino acid sequence of formula (I) comprises or consists of any one of SEQ ID NOs: 2-800.

[0167] In some embodiments, the amino acid sequence of formula (I) comprises or consists of SEQ ID NOs: 191, 198, 199, 215, 256, 379, 544, 550, or 748. In some embodiments, the amino acid sequence of formula (I) comprises or consists of SEQ ID NO: 191. In some embodiments, the amino acid sequence of formula (I) comprises or consists of SEQ ID NO: 198. In some embodiments, the amino acid sequence of formula (I) comprises or consists of SEQ ID NO: 199. In some embodiments, the amino acid sequence of formula (I) comprises or consists of SEQ ID NO: 215. In some embodiments, the amino acid sequence of formula (I) comprises or consists of SEQ ID NO: 256. In some embodiments, the amino acid sequence of formula (I) comprises or consists of SEQ ID NO: 379. In some embodiments, the amino acid sequence of formula (I) comprises or consists of SEQ ID NO: 544. In some embodiments, the amino acid sequence of formula (I) comprises or consists of SEQ ID NO: 550. In some embodiments, the amino acid sequence of formula (I) comprises or consists of SEQ ID NO: 748.

[0168] In some embodiments, the capsid protein further comprises a deletion of amino acid G267 relative to a wild type AAV9 vector. In some embodiments, the amino acid sequence of formula (I) comprises or consists of SEQ ID NO: 191 and the capsid protein further comprises a deletion of amino acid G267 relative to a wild type AAV9 vector. In some embodiments, the amino acid sequence of formula (I) comprises or consists of SEQ ID NO: 198 and the capsid protein further comprises a deletion of amino acid G267 relative to a wild type AAV9 vector. In some embodiments, the amino acid sequence of formula (I) comprises or consists of SEQ ID NO: 199 and the capsid protein further comprises a deletion of amino acid G267 relative to a wild type AAV9 vector. In some embodiments, the amino acid sequence of formula (I) comprises or consists of SEQ ID NO: 215 and the capsid protein further comprises a deletion of amino acid G267 relative to a wild type AAV9 vector. In some embodiments, the amino acid sequence of formula (I) comprises or consists of SEQ ID NO: 256 and the capsid protein further comprises a deletion of amino acid G267 relative to a wild type AAV9 vector. In some embodiments, the amino acid sequence of formula (I) comprises or consists of SEQ ID NO: 379 and the capsid protein further comprises a deletion of amino acid G267 relative to a wild type AAV9 vector. In some embodiments, the amino acid sequence of formula (I) comprises or consists of SEQ ID NO: 544 and the capsid protein further comprises a deletion of amino acid G267 relative to a wild type AAV9 vector. In some embodiments, the amino acid sequence of formula (I) comprises or consists of SEQ ID NO: 550 and the capsid protein further comprises a deletion of amino acid G267 relative to a wild type AAV9 vector. In some embodiments, the amino acid sequence of formula (I) comprises or consists of SEQ ID NO: 748 and the capsid protein further comprises a deletion of amino acid G267 relative to a wild type AAV9 vector.

[0169] Aspects of the present disclosure provide a pharmaceutical composition comprising any of the recombinant nucleic acids, the expression vectors (e.g., the AAV vectors), or the AAV particles described herein, and a pharmaceutically acceptable carrier.

[0170] Aspects of the present disclosure provide a method of treating DMD in a subject in need thereof, the method comprising administering to the subject an effective amount of any of the recombinant nucleic acids, the expression vectors (e.g., the AAV vectors), the AAV particles, or the pharmaceutical compositions described herein.

[0171] In some embodiments, the subject is a human subject. In some embodiments, the subject has at least one mutation in the dystrophin gene.

[0172] In some embodiments, the administering comprises intramuscular administration, subcutaneous injection, intravenous injection, or intravenous (IV) administration.

[0173] Aspects of the present disclosure provide uses of any of the recombinant nucleic acids, the expression vectors (e.g., the AAV vectors), the AAV particles, or the pharmaceutical compositions described herein for the manufacture of a medicament for treating DMD.

[0174] Aspects of the present disclosure provide any of the recombinant nucleic acids, the expression vectors (e.g., the AAV vectors), the AAV particles, or the pharmaceutical compositions described herein for use in treating DMD.

[0175] Aspects of the present disclosure provide a kit comprising any of the recombinant nucleic acids, the expression vectors (e.g., the AAV vectors), the AAV particles, or the pharmaceutical compositions described herein. In some embodiments, the kit further comprises instructions for use in treating Duchenne muscular dystrophy (DMD) in a subject in need thereof.

[0176] Aspects of the nucleic acid molecules (e.g., cargo) and capsid proteins are described in further detail below.

[0177] For sequences disclosed throughout this application, it is understood that nucleic acid molecules and peptides may comprise one or more substitutions, for example conservative substitutions, that allow sequences to continue to function. Accordingly, sequences may have at least 80%, 85%, 90%, 95%, 96%, 97%, 98%, or 99% sequence identity to the sequence disclosed.

[0178] A conservative substitution refers to amino acid substitutions that do not significantly affect or alter binding characteristics of a particular protein. Generally, conservative substitutions are ones in which a substituted amino acid residue is replaced with an amino acid residue having a similar side chain. For example, conservative substitutions may include a substitution found in one of the following groups: Group 1: Alanine (Ala or A), Glycine (Gly or G), Serine (Ser or S), Threonine (Thr or T); Group 2: Aspartic acid (Asp or D), Glutamic acid (Glu or Z); Group 3: Asparagine (Asn or N), Glutamine (Gln or Q); Group 4: Arginine (Arg or R), Lysine (Lys or K), Histidine (His or H); Group 5: Isoleucine (Ile or I), Leucine (Leu or L), Methionine (Met or M), Valine (Val or V); and Group 6: Phenylalanine (Phe or F), Tyrosine (Tyr or Y), Tryptophan (Trp or W). Additionally, or alternatively, amino acids can be grouped into conservative substitution groups by similar function, chemical structure, or composition (e.g., acidic, basic, aliphatic, aromatic, or sulfur-containing). For example, an aliphatic grouping may include, for purposes of substitution, Gly, Ala, Val, Leu, and Ile. Other conservative substitutions groups include sulfur-containing: Met and Cysteine (Cys or C); acidic: Asp, Glu, Asn, and Gln; small aliphatic, nonpolar, or slightly polar residues: Ala, Ser, Thr, Pro, and Gly; polar, negatively charged residues and their amides: Asp, Asn, Glu, and Gln; polar, positively charged residues: His, Arg, and Lys; large aliphatic, nonpolar residues: Met, Leu, Ile, Val, and Cys; and large aromatic residues: Phe, Tyr, and Trp.

### Codon Optimized Microdystrophin

[0179] The present invention provides novel engineered nucleic acids encoding microdystrophin proteins for use in gene therapy. The microdystrophin proteins of the invention are optimized to provide increased expression in muscle cells. Advantageously, microdystrophin proteins of the invention are substantially shorter than dystrophin, allowing for optimized packaging in expressing cassettes, including viral vectors.

[0180] Microdystrophin refers to a biologically active fragment of dystrophin, e.g., ΔR4-R23/ΔCT microdystrophin. Microdystrophin can be from any source, e.g., a human microdystrophin. The microdystrophin can comprise or consist of an amino acid sequence that is at least 85%, at least 86%, at least 87%, at least 88%, at least 89%, at least 90%, at least 91%, at least 92%, at least 93%, at least 94%, at least 95%, at least 96%, at least 97%, at least 98%, or at least 99% identical to SEQ ID NO: 2439. In some embodiments, microdystrophin comprises or consists of the amino acid sequence of SEQ ID NO: 2439.

[0181] Recombinant nucleic acids described herein can include a microdystrophin protein described herein or a variant thereof. For example, the recombinant nucleic acid comprises a microdystrophin comprising or consisting of an amino acid sequence of SEQ ID NO: 2439, or a variant thereof comprising 1, 2, 3, 4, 5, 6, 7, 8, 9, or 10 amino acid substitutions.

Microdystrophin protein sequence
(SEQ ID NO: 2439)
MLWWEEVEDCYEREDVQKKTFTKWVNAQFSKFGKQHIENLFSDLQDGRRLLDLLEGLTGQKLPKEKGSTRVHALN
NVNKALRVLQNNNVDLVNIGSTDIVDGNHKLTLGLIWNIILHWQVKNVMKNIMAGLQQTNSEKILLSWVRQSTRN
YPQVNVINFTTSWSDGLALNALIHSHRPDLFDWNSVVCQQSATQRLEHAFNIARYQLGIEKLLDPEDVDTTYPDK
KSILMYITSLFQVLPQQVSIEAIQEVEMLPRPPKVTKEEHFQLHHQMHYSQQITVSLAQGYERTSSPKPRFKSYA
YTQAAYVTTSDPTRSPFPSQHLEAPEDKSFGSSLMESEVNLDRYQTALEEVLSWLLSAEDTLQAQGEISNDVEVV
KDQFHTHEGYMMDLTAHQGRVGNILQLGSKLIGTGKLSEDEETEVQEQMNLLNSRWECLRVASMEKQSNLHRVLM
DLQNQKLKELNDWLTKTEERTRKMEEEPLGPDLEDLKRQVQQHKVLQEDLEQEQVRVNSLTHMVVVVDESSGDHA
TAALEEQLKVLGDRWANICRWTEDRWVLLQDILLKWQRLTEEQCLFSAWLSEKEDAVNKIHTTGFKDQNEMLSSL
QKLAVLKADLEKKKQSMGKLYSLKQDLLSTLKNKSVTQKTEAWLDNFARCWDNLVQKLEKSTAQISQAVTTTQPS
LTQTTVMETVTTVTTREQILVKHAQEELPPPPPQKKRTLERLQELQEATDELDLKLRQAEVIKGSWQPVGDLLID
SLQDHLEKVKALRGEIAPLKENVSHVNDLARQLTTLGIQLSPYNLSTLEDLNTRWKLLQVAVEDRVRQLHEAHRD
FGPASQHELSTSVQGPWERAISPNKVPYYINHETQTTCWDHPKMTELYQSLADLNNVRESAYRTAMKLRRLQKAL
CLDLLSLSAACDALDQHNLKQNDQPMDILQIINCLTTIYDRLEQEHNNLVNVPLCVDMCLNWLLNVYDTGRTGRI
RVLSFKTGIISLCKAHLEDKYRYLFKQVASSTGFCDQRRLGLLLHDSIQIPRQLGEVASFGGSNIEPSVRSCFQF
ANNKPEIEAALFLDWMRLEPQSMVWLPVLHRVAAAETAKHQAKCNICKECPIIGFRYRSLKHFNYDICQSCFFSG
RVAKGHKMHYPMVEYCTPTTSGEDVRDFAKVLKNKERTKRYFAKHPRMGYLPVQTVLEGDNMETDTM

[0182] Aspects of the invention provide a composition comprising a nucleic acid molecule comprising a sequence having at least 95% sequence identity with a sequence selected from SEQ ID NOs: 2405-2407, provided below:

| Name, | |
|---|---|
| SEQ ID | |
| NO | Optimized sequence |
| v1, | ATGCTGTGGTGGGAGGAAGTGGAGGACTGCTACGAGAGAGAGGACGTGCAGAAGAAGACCTTCACCA |
| SEQ ID | AGTGGGTGAACGCCCAGTTCAGCAAGTTCGGCAAGCAGCACATCGAGAACCTGTTCAGCGACCTGCA |
| NO: | GGACGGCAGAAGACTGCTGGACCTGCTGGAGGGCCTGACCGGCCAGAAGCTGCCTAAGGAGAAGGGC |
| 2405 | AGCACCAGAGTGCACGCTCTCAACAACGTGAACAAGGCCCTGAGAGTGCTGCAGAACAACAACGTGG |
| | ACCTTGTGAACATCGGAAGCACCGACATCGTGGATGGCAACCACAAGCTGACCCTGGGACTGATCTG |
| | GAACATCATCCTGCACTGGCAGGTGAAGAACGTCATGAAGAACATCATGGCCGGCCTGCAGCAGACC |
| | AACAGCGAAAAGATCCTGCTGAGCTGGGTCAGACAGAGCACCAGAAACTACCCTCAGGTGAACGTGA |
| | TCAACTTCACCACCAGCTGGAGCGACGGCCTGGCCCTGAACGCCCTGATCCACAGCCACAGACCCGA |
| | CCTGTTCGACTGGAACAGCGTGGTGTGCCAGCAGAGCGCCACCCAGAGACTGGAGCACGCCTTCAAC |
| | ATCGCCAGATACCAGCTGGGCATCGAGAAGCTGCTGGACCCCGAGGACGTGGATACCACCTACCCCG |
| | ACAAGAAGAGCATCCTGATGTACATCACCAGCCTGTTCCAGGTGCTGCCCCAGCAAGTGAGCATCGA |
| | GGCCATCCAGGAGGTGGAGATGCTGCCCAGACCTCCAAAGGTGACCAAGGAGGAGCACTTCCAGCTG |
| | CACCACCAGATGCACTACAGCCAGCAGATCACCGTGAGCCTGGCCCAGGGCTACGAGAGAACCAGCA |
| | GCCCCAAGCCCAGATTCAAGAGCTACGCCTACACCCAGGCCGCCTACGTGACCACCAGCGACCCCAC |
| | CAGAAGCCCCTTCCCCAGCCAGCACCTGGAGGCCCCCGAGGATAAGAGCTTCGGCAGCAGCCTGATG |
| | GAGAGCGAGGTGAACTTGGACAGATACCAGACCGCCCTGGAGGAGGTGCTGAGCTGGCTGCTGAGCG |
| | CCGAGGACACCCTTCAGGCACAGGGCGAGATCAGCAACGACGTGGAGGTGGTGAAGGACCAGTTCCA |
| | CACCCACGAGGGCTACATGATGGACCTGACCGCCCACCAGGGCAGAGTGGGTAACATCCTCCAGCTG |
| | GGAAGCAAGCTGATCGGCACCGGCAAGCTGAGCGAGGACGAGGAGACCGAGGTGCAAGAGCAAATGA |
| | ACCTGCTTAACAGCAGATGGGAGTGCCTGAGAGTGGCCAGCATGGAGAAGCAGAGCAACCTGCACAG |
| | AGTGCTGATGGACCTGCAGAACCAGAAGCTGAAGGAGCTGAACGACTGGCTGACCAAGACCGAGGAG |
| | AGAACCAGAAAGATGGAGGAGGAGCCCCTGGGCCCGGACCTGGAGGACCTGAAGCGGCAGGTGCAGC |
| | AGCACAAGGTCTTACAGGAGGACCTGGAGCAGGAGCAAGTGAGAGTGAACAGCCTGACCCACATGGT |
| | GGTGGTGGTGGATGAGAGCAGCGGCGACCACGCCACCGCCGCCCTGGAGGAGCAGCTGAAGGTGCTG |
| | GGCGACAGATGGGCCAACATCTGCAGATGGACCGAGGACAGATGGGTTCTGCTGCAGGACATCCTGC |
| | TGAAGTGGCAGAGACTGACCGAGGAACAGTGCCTGTTCAGCGCCTGGCTGAGTGAGAAGGAAGACGC |
| | TGTGAACAAGATCCACACCACCGGCTTCAAGGACCAGAACGAGATGCTGAGCAGCCTGCAGAAGCTG |
| | GCCGTGCTGAAGGCAGACCTGGAGAAGAAAAAGCAGTCCATGGGAAAGCTGTACAGCCTGAAGCAAG |
| | ACCTGCTGAGCACCCTGAAGAACAAGAGCGTGACCCAGAAGACCGAGGCCTGGCTGGACAACTTCGC |
| | CAGATGCTGGGACAACCTGGTTCAGAAGCTGGAGAAGAGCACCGCCCAGATCAGCCAGGCCGTGACC |
| | ACCACCCAGCCCAGCCTGACCCAGACCACCGTGATGGAGACCGTGACCACCGTGACCACCAGAGAGC |
| | AGATCCTGGTGAAGCACGCCCAGGAGGAGCTGCCCCCTCCTCCCCCGCAAAAGAAGAGAACCCTGGA |
| | GAGACTGCAGGAGCTGCAGGAGGCTACCGATGAGCTGGACCTGAAGCTGAGACAGGCCGAGGTGATC |
| | AAGGGCAGCTGGCAGCCCGTGGGTGACCTGCTTATCGACAGCCTGCAGGACCACCTAGAGAAGGTGA |
| | AGGCCCTGAGAGGCGAGATCGCCCCTCTGAAGGAGAACGTGAGCCACGTGAACGACCTGGCCAGACA |
| | GCTGACCACCCTGGGAATCCAGCTGAGCCCCTACAACCTGAGCACCCTGGAGGACCTGAACACGAGA |
| | TGGAAGCTGCTGCAAGTGGCCGTGGAGGACAGAGTCAGACAGTTGCACGAGGCTCACAGAGATTTCG |
| | GCCCCGCTAGTCAGCACTTCCTGAGCACCAGCGTGCAGGGCCCCTGGGAGAGAGCTATCAGCCCAAA |
| | CAAGGTGCCCTACTACATCAACCACGAGACCCAGACCACCTGCTGGGACCACCCCAAGATGACCGAG |
| | CTGTACCAGAGCCTGGCAGACCTCAACAACGTGAGATTCAGCGCCTACAGAACCGCCATGAAGCTGA |
| | GAAGACTGCAGAAGGCCCTGTGCCTGGACCTGCTGAGCCTGAGCGCCGCCTGCGACGCCCTGGACCA |
| | GCACAACCTGAAGCAGAACGACCAGCCCATGGACATCCTTCAGATCATCAACTGCCTGACCACCATC |
| | TACGACAGACTGGAGCAGGAACATAACAACCTGGTGAACGTGCCCCTGTGCGTGGACATGTGCCTGA |
| | ACTGGCTGCTGAACGTGTACGACACCGGCAGAACAGGCAGAATCAGAGTGCTGAGCTTCAAGACCGG |
| | CATCATCAGCCTGTGCAAGGCCCACCTGGAGGACAAGTACAGATACTTATTCAAGCAGGTGGCCAGC |
| | AGCACCGGCTTCTGCGATCAGAGAAGACTGGGCCTGCTGCTGCACGACAGCATCCAGATCCCCAGAC |
| | AGCTGGGCGAAGTGGCCAGCTTCGGCGGCAGCAACATCGAGCCCAGCGTGAGAAGCTGCTTCCAGTT |
| | CGCTAACAACAAGCCCGAGATCGAGGCCGCCCTGTTCTTGGACTGGATGAGACTGGAGCCCCAGAGC |
| | ATGGTGTGGCTGCCCGTGCTGCACAGAGTGGCCGCCGCCGAGACCGCCAAGCACCAGGCCAAGTGTA |
| | ACATCTGCAAGGAGTGCCCAATCATCGGCTTCAGATACAGAAGCCTGAAGCACTTCAACTACGACAT |
| | CTGCCAGAGCTGCTTCTTCAGCGGCAGAGTGGCCAAGGGCCACAAGATGCACTACCCCATGGTGGAG |
| | TACTGCACCCCCACCACCAGCGGCGAGGACGTGAGAGACTTCGCAAAGGTCCTGAAGAACAAGTTCA |
| | GAACCAAGAGATACTTCGCTAAGCACCCCAGAATGGGCTACCTGCCCGTGCAGACCGTGCTGGAGGG |
| | CGATAACATGGAGACCGACACCATGTGA |
| v2, | ATGCTGTGGTGGGAAGAGGTCGAGGACTGCTACGAGCGCGAAGATGTGCAGAAGAAAACTTTCACTA |
| SEQ ID | AATGGGTGAATGCCCAGTTCTCTAAGTTCGGAAAGCAGCACATCGAAAACCTGTTTTCCGATCTGCA |
| NO: | AGATGGCCGGCGGCTGCTGGACCTGCTGGAGGGGCTGACCGGACAGAAGCTGCCTAAGGAGAAAGGA |
| 2406 | TCTACCAGGGTCCATGCTCTGAATAACGTGAACAAGGCTCTGAGGGTGCTGCAGAACAATAACGTGG |
| | ACCTGGTGAACATTGGTTCCACAGACATCGTGGATGGAAACCACAAACTGACACTGGGACTGATCTG |
| | GAACATCATTCTGCATTGGCAAGTGAAGAACGTGATGAAGAACATCATGGCCGGACTGCAGCAGACG |
| | AACTCCGAGAAGATCCTGCTTAGCTGGGTGAGACAGAGTACCCGGAATTACCCACAGGTGAACGTGA |
| | TCAATTTCACAACCAGCTGGTCAGACGGCCTGGCTCTGAATGCCCTGATTCATAGCCACCGGCCAGA |
| | TCTGTTTGACTGGAACTCTGTCGTGTGTCAGCAGTCAGCCACCCAGAGGCTGGAGCACGCCTTCAAT |
| | ATTGCCCGCTATCAGCTGGGGATTGAGAAACTGCTGGACCCCGAGGATGTGGACACAACATACCCTG |
| | ACAAGAAGAGCATACTTATGTATATCACAAGCCTGTTCCAGGTGCTGCCACAGCAGGTCTCCATCGA |
| | GGCCATTCAAGAAGTGGAGATGCTGCCCAGGCCTCCTAAGGTCACCAAAGAGGAGCACTTTCAGCTC |
| | CATCATCAGATGCACTACAGCCAGCAAATTACCGTGTCCCTGGCCCAGGGCTACGAGAGGACAAGTT |
| | CCCCCAAGCCTAGATTTAAGAGCTATGCCTATACCCAGGCCGCCTACGTGACTACCTCCGATCCCAC |
| | CAGGAGCCCATTTCCCAGCCAGCACCTGGAGGCTCCCGAAGATAAGAGCTTTGGCAGCAGCCTGATG |
| | GAATCTGAGGTGAACCTGGACAGATACCAGACTGCGCTGGAGGAGGTGCTGTCCTGGCTGCTGAGCG |
| | CCGAGGACACCCTGCAGGCTCAGGGCGAGATTAGTAATGATGTGGAGGTGGTGAAGGATCAGTTTCA |
| | CACTCACGAAGGCTACATGATGGACCTGACCGCCCACCAGGGCAGGGTGGGGAACATTCTGCAGCTC |
| | GGGAGTAAGCTGATAGGGACCGGCAAACTGTCCGAGGATGAGGAAACCGAGGTGCAGGAGCAGATGA |
| | ACCTGCTTAACTCCCGGTGGGAGTGTCTGAGAGTGGCCAGCATGGAGAAGCAGAGCAATCTGCACAG |
| | AGTGCTGATGGATCTGCAGAATCAGAAGCTGAAGGAACTGAATGATTGGCTCACAAAGACAGAGGAG |
| | AGGACTAGAAAGATGGAGGAGGAGCCCCTGGGCCCTGACCTGGAGGACCTGAAGCGACAGGTGCAGC |
| | AGCACAAGGTGCTGCAGGAGGATCTGGAGCAAGAACAAGTGAGGGTGAACTCTCTGACTCATATGGT |
| | TGTGGTGGTGGACGAGTCTTCCGGAGACCACGCAACTGCCGCCCTCGAGGAGCAGCTGAAGGTGCTG |
| | GGCGATAGGTGGGCTAATATCTGTAGGTGGACCGAGGACAGATGGGTGCTGCTGCAGGATATCCTGC |
| | TGAAATGGCAGCGCCTGACAGAAGAGCAGTGTCTGTTCAGCGCATGGCTGAGCGAAAAGGAGGACGC |
| | TGTGAACAAGATCCACACTACAGGATTTAAAGACCAGAACGAGATGCTGAGTAGCCTGCAGAAGCTG |
| | GCTGTGCTGAAGGCTGATTTGGAGAAAAAGAAGCAGAGCATGGGCAAGCTGTACTCCCTGAAACAGG |
| | ACCTGCTGAGCACCCTGAAGAATAAGTCCGTGACCCAGAAAACCGAAGCTTGGCTGGACAACTTCGC |
| | GCGCTGCTGGGATAACCTGGTGCAGAAGCTGGAGAAGAGCACCGCCCAGATTTCTCAAGCAGTGACC |
| | ACAACCCAGCCCAGCCTGACCCAGACTACAGTAATGGAGACAGTCACTACCGTGACCACCCGGGAGC |
| | AGATCCTGGTGAAGCACGCCCAGGAAGAGCTGCCGCCCCCACCACCCCAGAAAAAGCGGACCCTGGA |
| | GCGCCTGCAGGAGCTCCAGGAGGCCACCGACGAACTGGATCTGAAGCTGAGGCAGGCCGAGGTGATT |
| | AAGGGATCCTGGCAGCCTGTGGGAGACCTGCTGATCGACAGCCTGCAGGATCATCTGGAGAAAGTCA |
| | AAGCTCTGAGAGGGGAGATCGCCCCACTGAAGGAGAACGTGAGCCACGTGAATGACCTGGCTAGACA |
| | GCTGACCACCTTGGGCATTCAGCTGAGTCCTTACAATCTGTCAACTCTGGAGGATCTGAACACCCGG |
| | TGGAAACTGCTGCAGGTGGCTGTGGAAGATCGGGTGCGCCAGTTACATGAGGCCCACAGGGACTTTG |
| | GCCCAGCCTCACAGCACTTTCTGTCAACCTCTGTGCAAGGACCTTGGGAGAGAGCAATCAGCCCAAA |
| | CAAGGTGCCATATTATATCAATCATGAGACTCAGACAACTTGCTGGGATCACCCCAAGATGACAGAA |
| | CTCTATCAGTCACTCGCCGATCTCAATAATGTACGGTTCTCTGCCTACCGGACAGCTATGAAGCTGC |
| | GGAGGCTGCAGAAGGCACTCTGTCTGGACCTGCTGAGTCTCTCTGCGGCCTGCGATGCCCTGGATCA |
| | ACATAACCTGAAGCAGAATGATCAGCCTATGGACATCCTGCAGATCATTAACTGTCTCACCACAATC |
| | TACGATCGGCTGGAACAGGAACATAACAACCTGGTGAATGTGCCACTGTGTGTGGACATGTGCCTGA |
| | ATTGGCTGCTCAACGTCTACGATACAGGCAGGACTGGCAGGATCCGCGTGCTGAGCTTTAAAACCGG |
| | CATCATCTCTCTGTGCAAAGCCCACCTGGAGGACAAATATCGGTACCTGTTTAAGCAGGTGGCCTCC |
| | AGCACAGGCTTCTGTGATCAGCGCCGGCTGGGCCTGCTGCTGCACGACAGCATTCAGATCCCTAGGC |
| | AGCTGGGCGAGGTGGCCTCCTTCGGCGGCTCAAACATTGAACCCAGCGTGAGATCTTGCTTTCAGTT |
| | TGCAAATAATAAACCCGAGATCGAGGCCGCCCTGTTCCTGGATTGGATGAGACTGGAGCCTCAGAGT |
| | ATGGTGTGGCTGCCAGTGCTGCATAGAGTGGCCGCCGCTGAGACGGCCAAGCACCAGGCAAAGTGCA |
| | ATATCTGCAAGGAATGCCCCATTATTGGCTTTCGATACCGGTCCTTGAAACACTTCAATTATGACAT |
| | CTGCCAGTCATGCTTCTTCAGCGGACGCGTGGCCAAGGGACACAAGATGCATTATCCTATGGTGGAA |
| | TACTGCACTCCAACTACTTCCGGCGAGGACGTGAGAGATTTCGCTAAAGTTCTTAAAAACAAATTTC |
| | GGACTAAGAGGTACTTCGCCAAGCACCCCCGCATGGGCTATCTGCCTGTGCAGACAGTGCTTGAAGG |
| | AGACAACATGGAAACCGATACAATGTGA |
| v3, | ATGCTGTGGTGGGAGGAGGTGGAGGATTGCTACGAGAGAGAGGACGTGCAGAAGAAAACCTTCACCA |
| SEQ ID | AATGGGTGAACGCCCAGTTCAGCAAGTTTGGCAAGCAGCACATCGAGAACCTGTTCAGCGATCTGCA |
| NO: | GGACGGCCGCAGGCTGCTGGATCTGCTGGAGGGTCTGACCGGCCAGAAACTGCCCAAAGAGAAGGGA |
| 2407 | TCAACCAGGGTGCACGCCCTGAATAATGTGAACAAGGCCCTGAGAGTGCTGCAAAATAATAATGTGG |
| | ATCTGGTGAACATCGGATCTACCGATATTGTGGACGGCAACCATAAGCTGACTCTGGGCCTGATCTG |
| | GAATATCATCCTGCACTGGCAGGTGAAAAATGTGATGAAAAACATCATGGCCGGGCTGCAGCAGACC |
| | AACTCTGAGAAGATCCTGCTGAGCTGGGTGAGGCAGTCTACAAGAAATTACCCCCAGGTGAACGTGA |
| | TCAATTTCACCACCAGCTGGTCCGACGGGCTGGCTCTGAATGCCCTGATTCACAGCCACCGGCCCGA |
| | CCTGTTCGACTGGAATTCCGTGGTGTGCCAGCAGAGCGCCACACAGAGACTGGAGCACGCTTTCAAT |
| | ATCGCTCGGTATCAGCTGGGCATCGAGAAGCTGCTGGACCCCGAGGACGTGGACACTACTTACCCCG |
| | ATAAAAAGAGCATCCTGATGTATATCACCTCCCTGTTCCAAGTGCTGCCCCAGCAGGTCTCCATCGA |
| | GGCCATCCAGGAGGTGGAAATGCTGCCCCGGCCCCCAAAGGTGACAAAGGAAGAACACTTCCAGCTC |
| | CACCACCAGATGCACTACTCTCAGCAGATCACCGTGAGCCTGGCCCAGGGGTACGAGCGGACCTCTT |
| | CTCCAAAGCCCCGCTTCAAGAGCTATGCCTATACCCAGGCCGCCTATGTGACCACCTCCGATCCCAC |
| | CCGCTCACCCTTCCCTTCTCAACACCTGGAAGCCCCAGAGGACAAGTCCTTCGGCAGTTCTCTGATG |
| | GAGTCTGAGGTGAACCTGGATAGATATCAGACTGCCCTGGAGGAGGTGCTGTCTTGGCTGCTCTCCG |
| | CCGAGGACACCCTGCAGGCACAGGGCGAGATCTCCAACGATGTGGAGGTGGTGAAGGACCAGTTCCA |
| | CACACACGAGGGCTATATGATGGACCTGACTGCCCATCAGGGCAGAGTGGGCAATATCCTGCAGCTG |
| | GGTTCCAAACTGATAGGCACCGGAAAGCTGAGCGAAGACGAGGAGACCGAGGTGCAGGAGCAGATGA |
| | ATCTGCTGAACTCCCGGTGGGAGTGCCTGCGAGTCGCCAGCATGGAAAAGCAGAGCAACCTGCACCG |
| | CGTGCTCATGGATCTGCAGAATCAGAAGCTGAAGGAGCTGAATGACTGGCTGACCAAGACCGAAGAG |
| | CGCACCAGGAAGATGGAGGAGGAGCCACTGGGCCCCGATCTGGAGGACCTGAAAAGACAGGTGCAGC |
| | AGCATAAAGTGCTGCAGGAGGACCTGGAGCAGGAACAAGTGAGAGTGAATTCTCTGACACACATGGT |
| | GGTGGTGGTGGACGAGAGCAGCGGCGACCACGCAACAGCCGCCCTGGAGGAGCAGCTGAAAGTGCTG |
| | GGAGACCGGTGGGCCAACATTTGCCGGTGGACCGAGGACCGCTGGGTGCTGCTGCAGGACATTCTGC |
| | TGAAGTGGCAGCGGCTGACCGAAGAGCAGTGCCTGTTCTCCGCCTGGCTGAGCGAGAAGGAGGACGC |
| | CGTGAATAAGATCCACACCACCGGGTTCAAGGACCAGAATGAGATGCTGTCCAGCCTGCAGAAGCTG |
| | GCCGTGCTGAAGGCCGATCTGGAAAAGAAGAAGCAGAGCATGGGAAAGCTGTATAGCCTGAAGCAGG |
| | ACCTGCTGTCTACTCTGAAAAACAAGTCAGTGACCCAGAAGACCGAGGCCTGGCTGGACAACTTCGC |
| | CCGCTGCTGGGACAACCTGGTGCAGAAGCTGGAAAAGAGCACCGCCCAGATCAGCCAGGCAGTGACT |
| | ACCACACAGCCCTCCCTGACACAGACTACTGTGATGGAGACCGTGACAACAGTGACCACAAGGGAGC |
| | AGATCCTGGTGAAGCACGCCCAGGAAGAACTGCCCCCTCCACCCCCTCAGAAGAAGAGAACTCTGGA |
| | AAGACTGCAGGAGCTGCAGGAGGCCACTGACGAGCTGGACCTGAAGCTGCGGCAGGCCGAGGTGATT |
| | AAGGGCAGCTGGCAGCCTGTGGGCGATCTGCTGATCGACAGCCTGCAGGACCACCTGGAGAAGGTGA |
| | AAGCCCTGCGGGGCGAGATCGCCCCTCTGAAGGAGAACGTCAGCCATGTGAATGACCTGGCCAGACA |
| | GCTGACCACACTGGGGATTCAGCTGTCTCCTTACAATCTGTCAACCCTGGAGGACCTGAACACTCGC |
| | TGGAAGCTGCTGCAGGTGGCCGTGGAGGACAGGGTGCGGCAGCTGCACGAAGCCCATCGCGACTTTG |
| | GGCCCGCCTCTCAGCACTTTCTGAGCACCTCCGTGCAGGGACCCTGGGAGCGGGCAATCAGCCCAAA |
| | CAAGGTGCCATACTACATCAACCACGAGACCCAGACCACCTGTTGGGATCACCCCAAGATGACAGAG |
| | CTGTACCAGTCTCTGGCTGACCTGAACAACGTGCGGTTCTCAGCCTACAGGACCGCCATGAAGCTGC |
| | GGAGACTGCAGAAGGCCCTGTGCCTGGATCTGCTGAGCCTCTCCGCTGCTTGTGACGCCCTGGATCA |
| | GCACAACCTGAAACAGAACGACCAGCCAATGGACATCCTGCAGATTATTAATTGCCTGACAACCATC |
| | TATGATCGGCTGGAACAGGAGCACAATAATCTGGTGAACGTGCCACTGTGCGTGGACATGTGCCTGA |
| | ATTGGCTGCTGAACGTGTACGACACAGGACGGACCGGCAGAATCAGAGTGCTGTCTTTTAAGACCGG |
| | GATCATCAGCCTGTGCAAAGCCCACCTGGAGGACAAGTACCGGTATCTGTTCAAACAAGTGGCCTCC |
| | AGCACCGGCTTTTGCGACCAGCGCAGGCTGGGCCTGCTGCTCCACGACTCCATCCAGATCCCTAGAC |
| | AGCTGGGCGAGGTGGCTTCTTTTGGCGGATCCAATATCGAGCCCAGTGTGCGGAGCTGTTTTCAGTT |
| | TGCTAATAATAAGCCTGAGATCGAGGCCGCTCTGTTCCTGGACTGGATGAGACTGGAGCCCCAGTCC |
| | ATGGTGTGGCTGCCAGTGCTGCACAGGGTCGCCGCCGCAGAGACTGCCAAGCACCAGGCCAAGTGCA |
| | ACATCTGCAAAGAATGCCCAATCATTGGCTTTAGATACCGGAGCCTCAAACACTTTAACTACGACAT |
| | CTGCCAGAGCTGCTTCTTCTCCGGCCGGGTGGCCAAGGGCCACAAGATGCACTACCCCATGGTGGAG |
| | TACTGTACCCCAACCACTTCCGGCGAGGACGTGAGAGATTTCGCCAAGGTGCTGAAGAACAAGTTCC |
| | GGACAAAGAGATACTTTGCAAAACACCCAAGAATGGGCTACCTGCCAGTGCAGACCGTGCTGGAGGG |
| | GGACAATATGGAGACAGACACAATGTGA |

[0183] In aspects of the invention, the nucleic acid molecule comprises a sequence having the sequence identity of SEQ ID NO: 2405, SEQ ID NO: 2406, or SEQ ID NO: 2407. In aspects of the invention, the nucleic acid molecule may comprise a sequence having at least 85%, 86%, 87%, 88% 89%, 90%, 91%, 92%, 93%, 94%, or 95% of the sequence identity of SEQ ID NO: 2405, SEQ ID NO: 2406, or SEQ ID NO: 2407.

[0184] Advantageously, microdystrophin proteins are substantially shorter than dystrophin, allowing for optimized packaging in expressing cassettes, including viral vectors.

[0185] Typical AAV vectors have a packaging capacity of ˜4.7 kb. Nucleic acids are almost universally packaged with two terminal ITRs, each about 0.14 kb in length. Additionally regulatory elements, for example promoter, intron, and poly (A) elements, may be about 0.6-1 kb. As a result, the maximal allowable cDNA length must be less than 3.8 kb. Gene therapies are restricted by the packaging capacity limit of adeno-associated viral (AAV) vectors. As a consequence, the size of the native dystrophin coding sequence prevents packaging of the transgene into traditional AAV serotypes, including AAV9.

[0186] Accordingly, in aspects of the invention, the nucleic acid molecule of the present invention may be suitably packaged in a vector.

[0187] For example, the vector may be an adeno-associated viral (AAV) vector. The nucleic acid molecule may comprise in order an inverted terminal repeats (ITR) region, a promoter, an intron, the sequence having at least 95% sequence identity with a sequence selected from SEQ ID NOs: 2405-2407, a poly adenylation signal, and an ITR region.

[0188] The AAV vector may comprise a capsid protein having at least one modification that results in reduced liver-tropism of the AAV vector and/or preferential targeting of the AAV vector to muscle tissue.

[0189] Advantageously, when administered to a subject with a mutation in the DMD gene, resulting in lack of dystrophin protein expression, the composition is effective at restoring a healthy phenotype.

[0190] Further advantageously, the microdystrophin protein expressed by the nucleic acid molecule may be smaller than 137.5 kilodaltons (for example, 137.32 kilodaltons). Aspects of the invention also provide methods of treating subjects suffering from DMD using compositions of the invention.

[0191] Methods of the invention comprise providing to the subject compositions of the invention described above, comprising a nucleic acid molecule comprising a sequence having at least 95% sequence identity with a sequence selected from SEQ ID NOs: 2405-2407.

DRG De-Targeting miRNAs

[0192] The present invention provides recombinant nucleic acids and recombinant expression vectors (e.g., AAV vectors) that encode a transgene (e.g., a microdystrophin) and the binding site(s) for specific micro RNAs (miRs) that direct the miRs to selectively inhibit expression of the same transgene (e.g., the microdystrophin). By the present invention, it was discovered that miR-338-3p, miR-138-5p, and miR-9-5p are highly expressed in dorsal root ganglial (DRG) cells and not expressed, or expressed at substantially low levels, in muscle cells (including skeletal and heart muscle cells).

[0193] Accordingly, aspects of the invention provide a recombinant nucleic acid and an engineered vector comprising a first nucleic acid sequence encoding a transgene (e.g., sequence encoding a microdystrophin) and a second nucleic acid sequence encoding for the binding site(s) of one or more miRs selected from among miR-338-3p, miR-138-5p, or miR-9-5p. In such instances, the second nucleic acid sequence can be referred to as DRG de-targeting miRNA binding site. Thus, as used herein, the term “DRG de-targeting binding site” refers to a nucleic acid sequence encoding for a binding site of a miR (e.g., miR-338-3p, miR-138-5p, and miR-9-5p) that is highly expressed in DRG cells but not expressed, or expressed at significantly lower levels, in muscle cells. The nucleic acid sequence encoding a binding site of a miR is sufficiently complementary with the nucleic acid sequence encoding the miR to effect base pairing (binding) between the DRG de-targeting binding site and the miR. Advantageously, the second nucleic acid sequence directs the miR, when present, to repress expression of the transgene. As a result, the selected miRs (miR-338-3p, miR-138-5p, miR-9-5p) in cells transduced by the vectors of the invention will be directed to inhibit expression of the transgene.

[0194] For example, the transgene (e.g., microdystrophin) may provide a therapeutic effect when expressed in skeletal and/or heart muscle but provide a toxic effect when expressed in DRG cells. Without being bound to a mechanism of action, transduction of both muscle cells and DRG cells by vectors of the invention results in transcription of both transgene mRNA and the binding site(s) of the select miR. In DRG cells with substantial endogenous expression of miR-338-3p, miR-138-5p, and miR-9-5p, transgene expression (e.g., microdystrophin expression) will be substantially repressed. In muscle cells with limited to no expression of miR-338-3p, miR-138-5p, miR-9-5p, transgene expression will not be substantially repressed. As a result, the therapeutic effect of the transgene will continue in muscle cells and the toxic effect in DRG cells will be abated.

[0195] In aspects of the invention, the second nucleic acid sequence may be operably linked to the first nucleic acid sequence, for example, the second nucleic acid sequence may be operably linked to the 3′ or 5′ end of the first nucleic acid sequence. Advantageously, this may result in increased transcription of both nucleic acid sequences.

[0196] The engineered vector may be a viral vector. For example, the vector may be an adeno-associated viral (AAV) vector. Further advantageously, the engineered vector may comprise a capsid protein with modified tropism for skeletal and/or heart muscle in comparison with the wild type AAV vector. For example, transduction and expression of the transgene may be increased in muscle tissue while limited expression of the transgene in off-target tissue types, for example, DRG may be observed.

[0197] The first nucleic acid sequence and second nucleic acid sequence may also be operably linked to tissue specific promoters. Advantageously, the first nucleic acid sequence may be operably linked to a muscle specific promoter. In aspects of the invention, the second nucleic acid is 3′ or 5′ of the first nucleic acid. For example, the second nucleic acid may be incorporated into a 3′ or 5′ untranslated region (UTR) of the transgene mRNA when transcribed.

[0198] In muscle tissue, where miR-338-3p, miR-138-5p, miR-9-5p expression is limited, the muscle specific promoter promotes transcription of the transgene and the miR binding site has limited to no effect due to the absence of the requisite miR. In cells expressing miR-338-3p, miR-138-5p, miR-9-5p, for example DRG, the muscle specific promoter limits transcription of the transgene while the miR binding site is still present in the transcript, inhibiting translation of any transgene mRNA transcribed.

[0199] Aspects of the invention also provide methods and uses of the recombinant nucleic acids and the recombinant expression vectors of the invention, for example, in therapeutic compositions. Accordingly, aspects of the invention provide a method or use of a recombinant nucleic acid or a recombinant expression vector, the method or use comprising providing to a subject a recombinant nucleic acid or a recombinant expression vector (e.g., an engineered vector (e.g., an AAV vector)) comprising a first nucleic acid sequence encoding a transgene (e.g., sequence encoding a microdystrophin protein) and a second nucleic acid sequence expressing the binding site of a miR selected from among miR-338-3p, miR-138-5p, or miR-9-5p. The second nucleic acid sequence thereby directs the miR, when present (for example endogenously), to repress expression of the transgene.

[0200] The transgene (e.g., microdystrophin) may be expressed in heart and/or skeletal muscle, thereby providing a therapeutic effect. The second nucleic acid sequence may be expressed in dorsal root ganglia cells and direct endogenous miR-338-3p, miR-138-5p, and/or miR-9-5p to repress expression of the transgene in dorsal root ganglia cells. For example, the transgene may provide a therapeutic effect when expressed in skeletal and/or heart muscle but provide a toxic effect when expressed in DRG cells.

[0201] Accordingly, in aspects of the invention, the DRG de-targeting miRNA may comprise a sequence have at least 90% or at least 95% of the sequence identity of one or more of:

(SEQ ID NO: 2399; miR-338-3p)
CAACAAAATCACTGATGCTGGA;
(SEQ ID NO: 2400; mir-138-5p)
CGGCCTGATTCACAACACCAGCT;
or
(SEQ ID NO: 2401; miR-9-5p)
TCATACAGCTAGATAACCAAAGA.

### Novel Promoters

[0202] The present invention provides novel promoters, that can be linked to a nucleic acid sequence encoding microdystrophin so that the transcription preferably occurs within myocytes and cardiomyocytes. Promoter regions enable the host cells to replicate the AAV delivered nucleic acid only in those cell types and tissues or organs in which the desired protein should be created. Here, the muscle specific promoter is included because it is principally desired that the proteins only be translated in myocytes and cardiomyocytes. Specificity of the cell type into which the nucleic acid is delivered and thus the protein translated is desired because of the adverse effects that may ensue from delivering the nucleic acid and having it translated in cells in which that nucleic acid and thus protein is not needed or not endogenously expressed.

[0203] Accordingly, aspects of the present invention provide a promoter having the sequence of any one of SEQ ID NOs: 2402-2404.

Promoter 1
(SEQ ID NO: 2402)
TAGTTATTAATAGTAATCAATTACGGGGTCATTAGTTCATAGCCCATATATGGAGTTCCGCGTTACATA
ACTTACGGTAAATGGCCCGCCTGGCTGACCGCCCAACGACCCCCGCCCATTGACGTCAATAATGACGTATGTTCC
CATAGTAACGCCAATAGGGACTTTCCATTGACGTCAATGGGTGGAGTATTTACGGTAAACTGCCCACTTGGCAGT
ACATCAAGTGTATCATATGCCAAGTACGCCCCCTATTGACGTCAATGACGGTAAATGGCCCGCCTGGCATTATGC
CCAGTACATGACCTTATGGGACTTTCCTACTTGGCAGTACATCTACGTATTAGTCATCGCTATTACCATGCTAGA
CTAGCATGCTGCCCATGTAAGGAGGCAAGGCCTGGGGACACCCGAGATGCCTGGTTATAATTAACCCAGACATGT
GGCTGCCCCCCCCCCCCAACACCTGCTGCCTCTAAAAATAACCCTGCATGCCATGTTCCCGGCGAAGGGCCAGCT
GTCCCCCGCCAGCTAGACTCAGCTCTCAGGGGCCCCTCCCTGGGGACAGCCCCTCCTGGCTAGTCACACCCTGTA
GGCTCCTCTATATAACCCAGGGGCACAGGGGCTGCCCTCATTCTACCACCACCTCCACAGCACAGACAGACACTC
AGGAGCCAGCCAGC
Promoter 2
(SEQ ID NO: 2403)
CGTCTGTCTAATTCCAGCCAAGGGCATGGGGGAAAGGACAGAGCCCAGGGACCTGTGGCCTATTCTCTGAGAGGA
CGCTGGGCTAATAATAGGAGGGGAGATTAGGGAGGGATTTGACTGCATTGTTATCTCACAGGAATGGCGTTTGAG
AGCCTTGCTTCCAAGCTCTTCCAAGAGTCATGCCACCCCCCTCCAATCTCTGTGGAAGTGCCCACTGCCTTTCCC
GCTTCGTTCTCTTCTCTCTAAATCTGAGCCCACCCCACTCAGGGGTACAGGATCTGGTTCATTTATCTCCCAGAA
TGATGCCTTGGGTTGCGTCCCCTCTAAACTCTGGCACATTCCAGCCCCTCTTTGGGAGAAAGAACATCTCTTCTT
GCCCAGGCCCTAGTGAGACATGCATCGCAAGACATGCTCCCCCCTTCCTCCCCGCTGGGCTCCAGCTGCTGCCAG
CCCTCCAAGAAAGGAGAGGCCCTGAGTTGGGCTATTTTGGTATCTGGGGTGGGCACCCGCAGGGCTAAGGTTACC
TTGGTATGTTAAGGGCTCCCTGGGGCAGGACTATATAACCCCAGAGGGACTGCCCCATGCTGACTCCTTGCTTCT
TTCCTGCTCGAGCCGCTGCCTTGCCCCCCGGAGACTGAAGACA
Promoter 3
(SEQ ID NO: 2404)
CGTCTGTCTAATTCCAGCCAAGGGCATGGGGGAAAGGACAGAGCCCAGGGACCTGTGGCCTATTCTCTGAGAGGA
CGCTGGGCTAATAATAGGAGGGGAGATTAGGGAGGGATTTGACTGCATTGTTATCTCACAGGAATGGCGTTTGAG
AGCCTTGCTTCCAAGCTCTTCCAAGAGTCATGCCACCCCCCTCCAATCTCTGTGGAAGTGCCCACTGCCTTTCCC
GCTTCGTTCTCTTCTCTCGGTCCCATCCCTGACCCACTAGCCTGGTGCCGGGGGGAGACCAATTTCTGGAGGAAG
CTCTGGGTACCCAGTCTTGCCCTAAGCCTGCCTCTGAACAGGCTGTTCTTGTTTATGACCCCCGTCCCAGCAGAA
TAGTGATTGCTCATCCCTGCATGTGATTTGAGAGGGCCAGTCTTTCAGGCCTGGAGGAAACTCAAGCCCCACCAG
CCGCTTGGCATCGGAATGCTCAGCTGGTCCCCTCCTGGGGCTCATGTGACCAAGATCTAGCTATAAATATCAGAG
GGGCCTCAGACCAAGACAGAATTCGGGCACCAGGAGAAGGAAGCCAACAGGATCCGACCCGGTGTTTTGTGACAA
AGGCAAGACCCCCAGGTCTACTTAGAGCAACGTTAGTAGAGGA

[0204] In some embodiments, the recombinant nucleic acid comprises a muscle specific promoter. Non-limiting examples of muscle specific promoters include a CK8 promoter, a desmin promotor, a Mb promoter, a MCK promoter, a MHCK7 promoter, a skeletal muscle alpha actin promoter, and a TTNI2 promoter.

[0205] In some embodiments, the recombinant nucleic acid comprises or consists of the nucleic acid sequence of that is at least 85%, at least 86%, at least 87%, at least 88%, at least 89%, at least 90%, at least 91%, at least 92%, at least 93%, at least 94%, at least 95%, at least 96%, at least 97%, at least 98%, or at least 99% identical to the nucleic acid sequence of any one of SEQ ID NOs: 2404-2407. In some embodiments, the recombinant nucleic acid comprises or consists of the nucleic acid sequence of any one of SEQ ID NOs: 2402-2404.

[0206] In some embodiments, the recombinant nucleic acid comprises or consists of the nucleic acid sequence of SEQ ID NO: 2402. In some embodiments, the recombinant nucleic acid comprises or consists of the nucleic acid sequence of SEQ ID NO: 2403. In some embodiments, the recombinant nucleic acid comprises or consists of the nucleic acid sequence of SEQ ID NO: 2404.

### Engineered Capsid Proteins

[0207] The present invention also provides novel capsid protein variants for viral vectors that de-target liver tissue and target skeletal muscle and heart tissue at the same time. Aspects of the present invention provide adeno-associated virus (AAV) vectors comprising a capsid protein comprising an insert comprising the amino acid sequence RGDR (SEQ ID NO: 2440). In the capsid protein, RGDR (SEQ ID NO: 2440) can be inserted after amino acid 455 in reference to an AAV9 capsid or an equivalent position in another AAV capsid. AAV vectors can comprise the amino acid sequence X₁NX₂X₃X₄RGDRX₅X₆L (SEQ ID NO: 1), wherein each of X₁, X₂, X₃, X₄, X₅, and X₆ is any amino acid.

[0208] In aspects of the invention, X₁ is an amino acid selected from the group consisting of: A, I, F, G, H, L, M, Q, S, T, and V. In some aspects of the invention, X₁ may be an amino acid selected from the group consisting of: A, I, L, M, S, and V.

[0209] In aspects of the invention, X₂ is an amino acid selected from the group consisting of A, G, S, T, and Y.

[0210] In aspects of the invention, X₃ is an amino acid selected from the group consisting of S, N, G, and P. In some aspects of the invention, X₃ is S.

[0211] In aspects of the invention, X₄ is an amino acid selected from the group consisting of A, G, H, I, M, S, T, and V.

[0212] In aspects of the invention, X₅ is an amino acid selected from the group consisting of A, G, and Q.

[0213] In aspects of the invention, X₆ is an amino acid selected from the group consisting of A, I, L, M, N, Y. In some aspects of the invention, X₆ is selected from the group consisting of A, S, and Y.

[0214] In aspects of the invention, X₁ is located at amino acid 451, X₂ is located at amino acid 453, X₃ is located at amino acid 454, X₄ is located amino acid 455, and RGDRX₅X₆L (SEQ ID NO: 2441) is inserted after amino acid 455 in reference to an AAV9 capsid or an equivalent position in another AAV capsid.

[0215] In aspects of the invention, two amino acids from X₁, X₂, X₃, and X₄ are wild type amino acids in reference to an AAV9 capsid or an equivalent position in another AAV capsid and two amino acids from X₁, X₂, X₃, and X₄ are not wild type amino acids.

[0216] For example, capsid proteins variants of the invention can comprise a sequence as set forth in Table 1a, e.g., a capsid protein can comprise any one of SEQ ID NOs: 2-800. Notably, capsid protein variants on the invention comprise deletions, substitutions, and/or insertions relative to wild type viral vector capsids.

[0217] In aspects of the invention, the capsid protein comprises an amino acid sequence selected from Table 1a and the amino acid sequence is in hypervariable region IV (HVR IV) relative to wild type AAV9. The capsid protein variant can comprise substitutions at amino acids 451-455 relative to a wild type AAV9 capsid. For example, the substitutions at amino acids 451-455 relative to a wild type AAV9 capsid can be an amino acid sequence selected from column 1 of Table 1b, e.g., the substitutions relative to a wild type AAV9 capsid can be an amino acid sequence selected from any one of SEQ ID NOs: 801-1599. In aspects of the invention, the capsid protein variant can further comprise an insert. For example, the capsid protein can comprise a 7-mer insert selected from column 2 of Table 1b, e.g., the capsid protein variant comprises a 7-mer insert comprising an amino acid sequence selected from any one of SEQ ID NOs: 1600-2398. The insert can be in the location after amino acid 455 relative to a wild type AAV9 vector.

[0218] Advantageously, viral vectors comprising an amino acid sequence of the invention exhibit muscle tropism as compared to a wild type AAV vector (e.g., a wild type AAV9 vector).

[0219] In aspects of the invention, the capsid protein further comprises a deletion of G267 in reference to an AAV9 capsid or an equivalent position in another AAV capsid. Advantageously, the capsid protein comprising a deletion of G267 may exhibit reduced liver tropism as compared to a wild type AAV capsid protein.

[0220] As described, for the HVR IV variants, the 5 amino acids upstream are at positions 451-455, shown in column 1 of Table 1b. The 7-mer insert for HVR IV variants starts with “RGDR” (SEQ ID NO: 2440) and is inserted after amino acid 455, shown in column 2 of Table 1b.

[0221] In some embodiments, the capsid protein comprises, relative to the wild type AAV9 capsid protein, the amino acid sequence of LNASI (SEQ ID NO: 990) at positions 451-455, the amino acid sequence of RGDRQLL (SEQ ID NO: 1789) inserted after amino acid 455, a deletion of the amino acid G267, and the remainder of the capsid is otherwise identical to wild type AAV9.

[0222] In some embodiments, the capsid protein comprises, relative to the wild type AAV9 capsid protein, the amino acid sequence of LNASM (SEQ ID NO: 997) at positions 451-455, the amino acid sequence of RGDRQAL (SEQ ID NO: 1796) inserted after amino acid 455, a deletion of the amino acid G267, and the remainder of the capsid is otherwise identical to wild type AAV9.

[0223] In some embodiments, the capsid protein comprises, relative to the wild type AAV9 capsid protein, the amino acid sequence of LNASM (SEQ ID NO: 998) at positions 451-455, the amino acid sequence of RGDRQSL (SEQ ID NO: 1797) inserted after amino acid 455, a deletion of the amino acid G267, and the remainder of the capsid is otherwise identical to wild type AAV9.

[0224] In some embodiments, the capsid protein comprises, relative to the wild type AAV9 capsid protein, the amino acid sequence of LNAST (SEQ ID NO: 1014) at positions 451-455, the amino acid sequence of RGDRQYL (SEQ ID NO: 1813) inserted after amino acid 455, a deletion of the amino acid G267, and the remainder of the capsid is otherwise identical to wild type AAV9.

[0225] In some embodiments, the capsid protein comprises, relative to the wild type AAV9 capsid protein, the amino acid sequence of LNGST (SEQ ID NO: 1055) at positions 451-455, the amino acid sequence of RGDRQYL (SEQ ID NO: 1854) inserted after amino acid 455, a deletion of the amino acid G267, and the remainder of the capsid is otherwise identical to wild type AAV9.

[0226] In some embodiments, the capsid protein comprises, relative to the wild type AAV9 capsid protein, the amino acid sequence of LNYST (SEQ ID NO: 1178) at positions 451-455, the amino acid sequence of RGDRQAL (SEQ ID NO: 1977) inserted after amino acid 455, a deletion of the amino acid G267, and the remainder of the capsid is otherwise identical to wild type AAV9.

[0227] In some embodiments, the capsid protein comprises, relative to the wild type AAV9 capsid protein, the amino acid sequence of SNAST (SEQ ID NO: 1343) at positions 451-455, the amino acid sequence of RGDRQYL (SEQ ID NO: 2142) inserted after amino acid 455, a deletion of the amino acid G267, and the remainder of the capsid is otherwise identical to wild type AAV9.

[0228] In some embodiments, the capsid protein comprises, relative to the wild type AAV9 capsid protein, the amino acid sequence of SNASV (SEQ ID NO: 1349) at positions 451-455, the amino acid sequence of RGDRQAL (SEQ ID NO: 2148) inserted after amino acid 455, a deletion of the amino acid G267, and the remainder of the capsid is otherwise identical to wild type AAV9.

[0229] In some embodiments, the capsid protein comprises, relative to the wild type AAV9 capsid protein, the amino acid sequence of VNGST (SEQ ID NO: 1547) at positions 451-455, the amino acid sequence of RGDRQYL (SEQ ID NO: 2346) inserted after amino acid 455, a deletion of the amino acid G267, and the remainder of the capsid is otherwise identical to wild type AAV9.

TABLE 1a
HVR IV
Capsid Variants

| Amino Acid | SEQ ID |
|---|---|
| Sequence | NO: |
| ANASARGDRAAL | 2 |
| ANASARGDRGSL | 3 |
| ANASARGDRGYL | 4 |
| ANASARGDRQAL | 5 |
| ANASARGDRQSL | 6 |
| ANASARGDRQYL | 7 |
| ANASGRGDRAAL | 8 |
| ANASGRGDRASL | 9 |
| ANASGRGDRAYL | 10 |
| ANASGRGDRGAL | 11 |
| ANASGRGDRGSL | 12 |
| ANASGRGDRGYL | 13 |
| ANASGRGDRQAL | 14 |
| ANASGRGDRQSL | 15 |
| ANASGRGDRQYL | 16 |
| ANASMRGDRAAL | 17 |
| ANASMRGDRASL | 18 |
| ANASMRGDRAYL | 19 |
| ANASMRGDRQAL | 20 |
| ANASMRGDRQSL | 21 |
| ANASSRGDRGSL | 22 |
| ANASSRGDRGYL | 23 |
| ANASSRGDRQAL | 24 |
| ANASSRGDRQSL | 25 |
| ANASSRGDRQYL | 26 |
| ANASTRGDRASL | 27 |
| ANASTRGDRAYL | 28 |
| ANASTRGDRGAL | 29 |
| ANASTRGDRGSL | 30 |
| ANASTRGDRGYL | 31 |
| ANASTRGDRQAL | 32 |
| ANASTRGDRQSL | 33 |
| ANASTRGDRQYL | 34 |
| ANASVRGDRASL | 35 |
| ANASVRGDRGYL | 36 |
| ANASVRGDRQAL | 37 |
| ANASVRGDRQSL | 38 |
| ANASVRGDRQYL | 39 |
| ANGNFRGDRQNL | 40 |
| ANGNVRGDRGML | 41 |
| ANGSARGDRAYL | 42 |
| ANGSARGDRGSL | 43 |
| ANGSARGDRGYL | 44 |
| ANGSARGDRQAL | 45 |
| ANGSARGDRQYL | 46 |
| ANGSGRGDRAAL | 47 |
| ANGSGRGDRAYL | 48 |
| ANGSGRGDRGAL | 49 |
| ANGSGRGDRGSL | 50 |
| ANGSGRGDRGYL | 51 |
| ANGSGRGDRQAL | 52 |
| ANGSGRGDRQSL | 53 |
| ANGSGRGDRQYL | 54 |
| ANGSMRGDRGYL | 55 |
| ANGSMRGDRQAL | 56 |
| ANGSMRGDRQSL | 57 |
| ANGSMRGDRQYL | 58 |
| ANGSSRGDRAYL | 59 |
| ANGSSRGDRGSL | 60 |
| ANGSSRGDRGYL | 61 |
| ANGSSRGDRQAL | 62 |
| ANGSSRGDRQSL | 63 |
| ANGSSRGDRQYL | 64 |
| ANGSTRGDRAAL | 65 |
| ANGSTRGDRAYL | 66 |
| ANGSTRGDRGAL | 67 |
| ANGSTRGDRGYL | 68 |
| ANGSTRGDRQAL | 69 |
| ANGSTRGDRQSL | 70 |
| ANGSTRGDRQYL | 71 |
| ANGSVRGDRAYL | 72 |
| ANGSVRGDRGYL | 73 |
| ANGSVRGDRQAL | 74 |
| ANGSVRGDRQYL | 75 |
| ANSGMRGDRGAL | 76 |
| ANSSARGDRGAL | 77 |
| ANSSARGDRGSL | 78 |
| ANSSARGDRGYL | 79 |
| ANSSARGDRQAL | 80 |
| ANSSARGDRQSL | 81 |
| ANSSARGDRQYL | 82 |
| ANSSGRGDRAAL | 83 |
| ANSSGRGDRASL | 84 |
| ANSSGRGDRAYL | 85 |
| ANSSGRGDRGAL | 86 |
| ANSSGRGDRGSL | 87 |
| ANSSGRGDRGYL | 88 |
| ANSSGRGDRQAL | 89 |
| ANSSGRGDRQSL | 90 |
| ANSSGRGDRQYL | 91 |
| ANSSMRGDRAYL | 92 |
| ANSSMRGDRQAL | 93 |
| ANSSMRGDRQSL | 94 |
| ANSSMRGDRQYL | 95 |
| ANSSSRGDRGSL | 96 |
| ANSSSRGDRGYL | 97 |
| ANSSSRGDRQAL | 98 |
| ANSSSRGDRQSL | 99 |
| ANSSSRGDRQYL | 100 |
| ANSSTRGDRAAL | 101 |
| ANSSTRGDRGSL | 102 |
| ANSSTRGDRQAL | 103 |
| ANSSTRGDRQSL | 104 |
| ANSSTRGDRQYL | 105 |
| ANSSVRGDRAYL | 106 |
| ANSSVRGDRGYL | 107 |
| ANSSVRGDRQAL | 108 |
| ANSSVRGDRQSL | 109 |
| ANSSVRGDRQYL | 110 |
| ANTSARGDRAYL | 111 |
| ANTSARGDRGAL | 112 |
| ANTSARGDRGSL | 113 |
| ANTSARGDRGYL | 114 |
| ANTSARGDRQAL | 115 |
| ANTSARGDRQYL | 116 |
| ANTSGRGDRASL | 117 |
| ANTSGRGDRGAL | 118 |
| ANTSGRGDRGSL | 119 |
| ANTSGRGDRGYL | 120 |
| ANTSGRGDRQAL | 121 |
| ANTSGRGDRQSL | 122 |
| ANTSGRGDRQYL | 123 |
| ANTSMRGDRAYL | 124 |
| ANTSMRGDRQAL | 125 |
| ANTSMRGDRQSL | 126 |
| ANTSMRGDRQYL | 127 |
| ANTSSRGDRGSL | 128 |
| ANTSSRGDRQAL | 129 |
| ANTSSRGDRQYL | 130 |
| ANTSTRGDRAAL | 131 |
| ANTSTRGDRQAL | 132 |
| ANTSTRGDRQSL | 133 |
| ANTSTRGDRQYL | 134 |
| ANTSVRGDRAYL | 135 |
| ANTSVRGDRGSL | 136 |
| ANTSVRGDRQAL | 137 |
| ANTSVRGDRQSL | 138 |
| ANTSVRGDRQYL | 139 |
| ANYPHRGDRGAL | 140 |
| ANYSARGDRAAL | 141 |
| ANYSARGDRASL | 142 |
| ANYSARGDRGAL | 143 |
| ANYSARGDRGSL | 144 |
| ANYSARGDRQAL | 145 |
| ANYSARGDRQSL | 146 |
| ANYSGRGDRAAL | 147 |
| ANYSGRGDRASL | 148 |
| ANYSGRGDRGAL | 149 |
| ANYSGRGDRGSL | 150 |
| ANYSGRGDRQAL | 151 |
| ANYSGRGDRQSL | 152 |
| ANYSGRGDRQYL | 153 |
| ANYSMRGDRAAL | 154 |
| ANYSMRGDRASL | 155 |
| ANYSMRGDRAYL | 156 |
| ANYSMRGDRQAL | 157 |
| ANYSMRGDRQSL | 158 |
| ANYSSRGDRGAL | 159 |
| ANYSSRGDRGSL | 160 |
| ANYSSRGDRQAL | 161 |
| ANYSSRGDRQSL | 162 |
| ANYSSRGDRQYL | 163 |
| ANYSTRGDRQAL | 164 |
| ANYSTRGDRQSL | 165 |
| ANYSTRGDRQYL | 166 |
| ANYSVRGDRQAL | 167 |
| ANYSVRGDRQSL | 168 |
| ANYSVRGDRQYL | 169 |
| FNSGMRGDRGAL | 170 |
| GNSGMRGDRGAL | 171 |
| HNSGMRGDRGAL | 172 |
| LNASARGDRAAL | 173 |
| LNASARGDRASL | 174 |
| LNASARGDRAYL | 175 |
| LNASARGDRGAL | 176 |
| LNASARGDRGSL | 177 |
| LNASARGDRGYL | 178 |
| LNASARGDRQAL | 179 |
| LNASARGDRQSL | 180 |
| LNASARGDRQYL | 181 |
| LNASGRGDRAAL | 182 |
| LNASGRGDRASL | 183 |
| LNASGRGDRAYL | 184 |
| LNASGRGDRGAL | 185 |
| LNASGRGDRGSL | 186 |
| LNASGRGDRGYL | 187 |
| LNASGRGDRQAL | 188 |
| LNASGRGDRQSL | 189 |
| LNASGRGDRQYL | 190 |
| LNASIRGDRQLL | 191 |
| LNASMRGDRAAL | 192 |
| LNASMRGDRASL | 193 |
| LNASMRGDRAYL | 194 |
| LNASMRGDRGAL | 195 |
| LNASMRGDRGSL | 196 |
| LNASMRGDRGYL | 197 |
| LNASMRGDRQAL | 198 |
| LNASMRGDRQSL | 199 |
| LNASMRGDRQYL | 200 |
| LNASSRGDRAAL | 201 |
| LNASSRGDRASL | 202 |
| LNASSRGDRGAL | 203 |
| LNASSRGDRGSL | 204 |
| LNASSRGDRQAL | 205 |
| LNASSRGDRQSL | 206 |
| LNASSRGDRQYL | 207 |
| LNASTRGDRAAL | 208 |
| LNASTRGDRASL | 209 |
| LNASTRGDRGAL | 210 |
| LNASTRGDRGSL | 211 |
| LNASTRGDRGYL | 212 |
| LNASTRGDRQAL | 213 |
| LNASTRGDRQSL | 214 |
| LNASTRGDRQYL | 215 |
| LNASVRGDRAAL | 216 |
| LNASVRGDRASL | 217 |
| LNASVRGDRGAL | 218 |
| LNASVRGDRGSL | 219 |
| LNASVRGDRQAL | 220 |
| LNASVRGDRQSL | 221 |
| LNASVRGDRQYL | 222 |
| LNGNFRGDRQNL | 223 |
| LNGNVRGDRGML | 224 |
| LNGSARGDRAAL | 225 |
| LNGSARGDRAYL | 226 |
| LNGSARGDRGSL | 227 |
| LNGSARGDRGYL | 228 |
| LNGSARGDRQAL | 229 |
| LNGSARGDRQSL | 230 |
| LNGSARGDRQYL | 231 |
| LNGSGRGDRAAL | 232 |
| LNGSGRGDRAYL | 233 |
| LNGSGRGDRGAL | 234 |
| LNGSGRGDRGSL | 235 |
| LNGSGRGDRGYL | 236 |
| LNGSGRGDRQAL | 237 |
| LNGSGRGDRQYL | 238 |
| LNGSMRGDRASL | 239 |
| LNGSMRGDRGYL | 240 |
| LNGSMRGDRQAL | 241 |
| LNGSMRGDRQSL | 242 |
| LNGSMRGDRQYL | 243 |
| LNGSSRGDRAAL | 244 |
| LNGSSRGDRAYL | 245 |
| LNGSSRGDRGAL | 246 |
| LNGSSRGDRQYL | 247 |
| LNGSTRGDRAAL | 248 |
| LNGSTRGDRASL | 249 |
| LNGSTRGDRAYL | 250 |
| LNGSTRGDRGAL | 251 |
| LNGSTRGDRGSL | 252 |
| LNGSTRGDRGYL | 253 |
| LNGSTRGDRQAL | 254 |
| LNGSTRGDRQSL | 255 |
| LNGSTRGDRQYL | 256 |
| LNGSVRGDRASL | 257 |
| LNGSVRGDRAYL | 258 |
| LNGSVRGDRGYL | 259 |
| LNGSVRGDRQAL | 260 |
| LNGSVRGDRQSL | 261 |
| LNGSVRGDRQYL | 262 |
| LNSGMRGDRGAL | 263 |
| LNSSARGDRASL | 264 |
| LNSSARGDRAYL | 265 |
| LNSSARGDRGAL | 266 |
| LNSSARGDRGIL | 267 |
| LNSSARGDRGSL | 268 |
| LNSSARGDRGYL | 269 |
| LNSSARGDRQAL | 270 |
| LNSSARGDRQSL | 271 |
| LNSSARGDRQYL | 272 |
| LNSSGRGDRAAL | 273 |
| LNSSGRGDRASL | 274 |
| LNSSGRGDRAYL | 275 |
| LNSSGRGDRGAL | 276 |
| LNSSGRGDRGSL | 277 |
| LNSSGRGDRGYL | 278 |
| LNSSGRGDRQAL | 279 |
| LNSSGRGDRQSL | 280 |
| LNSSGRGDRQYL | 281 |
| LNSSMRGDRAAL | 282 |
| LNSSMRGDRASL | 283 |
| LNSSMRGDRAYL | 284 |
| LNSSMRGDRGAL | 285 |
| LNSSMRGDRGSL | 286 |
| LNSSMRGDRQAL | 287 |
| LNSSMRGDRQSL | 288 |
| LNSSMRGDRQYL | 289 |
| LNSSSRGDRAAL | 290 |
| LNSSSRGDRGAL | 291 |
| LNSSSRGDRGSL | 292 |
| LNSSSRGDRQAL | 293 |
| LNSSSRGDRQSL | 294 |
| LNSSSRGDRQYL | 295 |
| LNSSTRGDRAAL | 296 |
| LNSSTRGDRASL | 297 |
| LNSSTRGDRGAL | 298 |
| LNSSTRGDRGSL | 299 |
| LNSSTRGDRQAL | 300 |
| LNSSTRGDRQSL | 301 |
| LNSSTRGDRQYL | 302 |
| LNSSVRGDRAAL | 303 |
| LNSSVRGDRASL | 304 |
| LNSSVRGDRGAL | 305 |
| LNSSVRGDRGSL | 306 |
| LNSSVRGDRGYL | 307 |
| LNSSVRGDRQAL | 308 |
| LNSSVRGDRQSL | 309 |
| LNSSVRGDRQYL | 310 |
| LNTSARGDRAAL | 311 |
| LNTSARGDRASL | 312 |
| LNTSARGDRAYL | 313 |
| LNTSARGDRGAL | 314 |
| LNTSARGDRGSL | 315 |
| LNTSARGDRGYL | 316 |
| LNTSARGDRQAL | 317 |
| LNTSARGDRQSL | 318 |
| LNTSARGDRQYL | 319 |
| LNTSGRGDRAAL | 320 |
| LNTSGRGDRASL | 321 |
| LNTSGRGDRAYL | 322 |
| LNTSGRGDRGAL | 323 |
| LNTSGRGDRGSL | 324 |
| LNTSGRGDRGYL | 325 |
| LNTSGRGDRQAL | 326 |
| LNTSGRGDRQSL | 327 |
| LNTSGRGDRQYL | 328 |
| LNTSMRGDRAAL | 329 |
| LNTSMRGDRASL | 330 |
| LNTSMRGDRAYL | 331 |
| LNTSMRGDRGAL | 332 |
| LNTSMRGDRGSL | 333 |
| LNTSMRGDRQAL | 334 |
| LNTSMRGDRQSL | 335 |
| LNTSMRGDRQYL | 336 |
| LNTSSRGDRAAL | 337 |
| LNTSSRGDRGSL | 338 |
| LNTSSRGDRQAL | 339 |
| LNTSSRGDRQSL | 340 |
| LNTSSRGDRQYL | 341 |
| LNTSTRGDRAAL | 342 |
| LNTSTRGDRASL | 343 |
| LNTSTRGDRGAL | 344 |
| LNTSTRGDRGSL | 345 |
| LNTSTRGDRQAL | 346 |
| LNTSTRGDRQSL | 347 |
| LNTSTRGDRQYL | 348 |
| LNTSVRGDRAAL | 349 |
| LNTSVRGDRASL | 350 |
| LNTSVRGDRAYL | 351 |
| LNTSVRGDRGAL | 352 |
| LNTSVRGDRGSL | 353 |
| LNTSVRGDRQAL | 354 |
| LNTSVRGDRQSL | 355 |
| LNYPHRGDRGAL | 356 |
| LNYSARGDRGAL | 357 |
| LNYSARGDRGSL | 358 |
| LNYSARGDRQAL | 359 |
| LNYSARGDRQSL | 360 |
| LNYSARGDRQYL | 361 |
| LNYSGRGDRAAL | 362 |
| LNYSGRGDRASL | 363 |
| LNYSGRGDRGAL | 364 |
| LNYSGRGDRGSL | 365 |
| LNYSGRGDRQAL | 366 |
| LNYSGRGDRQSL | 367 |
| LNYSGRGDRQYL | 368 |
| LNYSMRGDRQAL | 369 |
| LNYSMRGDRQSL | 370 |
| LNYSSRGDRGAL | 371 |
| LNYSSRGDRGSL | 372 |
| LNYSSRGDRQAL | 373 |
| LNYSSRGDRQSL | 374 |
| LNYSSRGDRQYL | 375 |
| LNYSTRGDRASL | 376 |
| LNYSTRGDRGAL | 377 |
| LNYSTRGDRGSL | 378 |
| LNYSTRGDRQAL | 379 |
| LNYSTRGDRQSL | 380 |
| LNYSTRGDRQYL | 381 |
| LNYSVRGDRQAL | 382 |
| LNYSVRGDRQSL | 383 |
| MNASARGDRAAL | 384 |
| MNASARGDRAYL | 385 |
| MNASARGDRGSL | 386 |
| MNASARGDRGYL | 387 |
| MNASARGDRQAL | 388 |
| MNASARGDRQSL | 389 |
| MNASARGDRQYL | 390 |
| MNASGRGDRAAL | 391 |
| MNASGRGDRASL | 392 |
| MNASGRGDRAYL | 393 |
| MNASGRGDRGSL | 394 |
| MNASGRGDRQAL | 395 |
| MNASGRGDRQSL | 396 |
| MNASGRGDRQYL | 397 |
| MNASIRGDRQLL | 398 |
| MNASMRGDRAAL | 399 |
| MNASMRGDRAYL | 400 |
| MNASMRGDRGAL | 401 |
| MNASMRGDRQAL | 402 |
| MNASMRGDRQSL | 403 |
| MNASSRGDRAAL | 404 |
| MNASTRGDRAAL | 405 |
| MNASTRGDRASL | 406 |
| MNASTRGDRAYL | 407 |
| MNASTRGDRGAL | 408 |
| MNASTRGDRGSL | 409 |
| MNASTRGDRQAL | 410 |
| MNASTRGDRQSL | 411 |
| MNASTRGDRQYL | 412 |
| MNASVRGDRAAL | 413 |
| MNASVRGDRASL | 414 |
| MNASVRGDRAYL | 415 |
| MNASVRGDRQAL | 416 |
| MNASVRGDRQSL | 417 |
| MNASVRGDRQYL | 418 |
| MNGNFRGDRQNL | 419 |
| MNGSARGDRAYL | 420 |
| MNGSARGDRGYL | 421 |
| MNGSARGDRQAL | 422 |
| MNGSARGDRQSL | 423 |
| MNGSARGDRQYL | 424 |
| MNGSGRGDRAAL | 425 |
| MNGSGRGDRAYL | 426 |
| MNGSGRGDRGAL | 427 |
| MNGSGRGDRGSL | 428 |
| MNGSGRGDRGYL | 429 |
| MNGSGRGDRQAL | 430 |
| MNGSGRGDRQSL | 431 |
| MNGSGRGDRQYL | 432 |
| MNGSMRGDRQAL | 433 |
| MNGSMRGDRQSL | 434 |
| MNGSMRGDRQYL | 435 |
| MNGSSRGDRQYL | 436 |
| MNGSTRGDRAYL | 437 |
| MNGSTRGDRGAL | 438 |
| MNGSTRGDRGYL | 439 |
| MNGSTRGDRQAL | 440 |
| MNGSTRGDRQSL | 441 |
| MNGSTRGDRQYL | 442 |
| MNGSVRGDRGYL | 443 |
| MNGSVRGDRQAL | 444 |
| MNGSVRGDRQYL | 445 |
| MNSGMRGDRGAL | 446 |
| MNSSARGDRAAL | 447 |
| MNSSARGDRAYL | 448 |
| MNSSARGDRGSL | 449 |
| MNSSARGDRGYL | 450 |
| MNSSARGDRQAL | 451 |
| MNSSARGDRQSL | 452 |
| MNSSARGDRQYL | 453 |
| MNSSGRGDRAAL | 454 |
| MNSSGRGDRASL | 455 |
| MNSSGRGDRAYL | 456 |
| MNSSGRGDRGAL | 457 |
| MNSSGRGDRGSL | 458 |
| MNSSGRGDRQAL | 459 |
| MNSSGRGDRQSL | 460 |
| MNSSGRGDRQYL | 461 |
| MNSSMRGDRAAL | 462 |
| MNSSMRGDRASL | 463 |
| MNSSMRGDRAYL | 464 |
| MNSSMRGDRGSL | 465 |
| MNSSMRGDRQAL | 466 |
| MNSSMRGDRQSL | 467 |
| MNSSMRGDRQYL | 468 |
| MNSSSRGDRAAL | 469 |
| MNSSTRGDRAAL | 470 |
| MNSSTRGDRASL | 471 |
| MNSSTRGDRQAL | 472 |
| MNSSTRGDRQSL | 473 |
| MNSSTRGDRQYL | 474 |
| MNSSVRGDRAAL | 475 |
| MNSSVRGDRAYL | 476 |
| MNSSVRGDRQAL | 477 |
| MNSSVRGDRQSL | 478 |
| MNSSVRGDRQYL | 479 |
| MNTSARGDRAYL | 480 |
| MNTSGRGDRAAL | 481 |
| MNTSGRGDRQAL | 482 |
| MNTSGRGDRQYL | 483 |
| MNTSMRGDRAYL | 484 |
| MNTSTRGDRQYL | 485 |
| MNYPHRGDRGAL | 486 |
| MNYSARGDRAAL | 487 |
| MNYSARGDRGYL | 488 |
| MNYSARGDRQAL | 489 |
| MNYSARGDRQSL | 490 |
| MNYSGRGDRAAL | 491 |
| MNYSGRGDRASL | 492 |
| MNYSGRGDRGSL | 493 |
| MNYSGRGDRQAL | 494 |
| MNYSGRGDRQSL | 495 |
| MNYSSRGDRQAL | 496 |
| MNYSTRGDRAAL | 497 |
| MNYSTRGDRQAL | 498 |
| MNYSTRGDRQSL | 499 |
| MNYSTRGDRQYL | 500 |
| NNSGMRGDRGAL | 501 |
| QNSGMRGDRGAL | 502 |
| SNASARGDRAAL | 503 |
| SNASARGDRASL | 504 |
| SNASARGDRAYL | 505 |
| SNASARGDRGAL | 506 |
| SNASARGDRGSL | 507 |
| SNASARGDRGYL | 508 |
| SNASARGDRQAL | 509 |
| SNASARGDRQSL | 510 |
| SNASARGDRQYL | 511 |
| SNASGRGDRAAL | 512 |
| SNASGRGDRASL | 513 |
| SNASGRGDRAYL | 514 |
| SNASGRGDRGAL | 515 |
| SNASGRGDRGSL | 516 |
| SNASGRGDRGYL | 517 |
| SNASGRGDRQAL | 518 |
| SNASGRGDRQSL | 519 |
| SNASGRGDRQYL | 520 |
| SNASIRGDRQLL | 521 |
| SNASMRGDRAAL | 522 |
| SNASMRGDRASL | 523 |
| SNASMRGDRGAL | 524 |
| SNASMRGDRGSL | 525 |
| SNASMRGDRQAL | 526 |
| SNASMRGDRQSL | 527 |
| SNASSRGDRAAL | 528 |
| SNASSRGDRASL | 529 |
| SNASSRGDRAYL | 530 |
| SNASSRGDRGAL | 531 |
| SNASSRGDRGSL | 532 |
| SNASSRGDRQAL | 533 |
| SNASSRGDRQSL | 534 |
| SNASSRGDRQYL | 535 |
| SNASTRGDRAAL | 536 |
| SNASTRGDRASL | 537 |
| SNASTRGDRAYL | 538 |
| SNASTRGDRGAL | 539 |
| SNASTRGDRGSL | 540 |
| SNASTRGDRGYL | 541 |
| SNASTRGDRQAL | 542 |
| SNASTRGDRQSL | 543 |
| SNASTRGDRQYL | 544 |
| SNASVRGDRAAL | 545 |
| SNASVRGDRASL | 546 |
| SNASVRGDRAYL | 547 |
| SNASVRGDRGSL | 548 |
| SNASVRGDRGYL | 549 |
| SNASVRGDRQAL | 550 |
| SNASVRGDRQSL | 551 |
| SNASVRGDRQYL | 552 |
| SNGNFRGDRQNL | 553 |
| SNGNVRGDRGML | 554 |
| SNGSARGDRGYL | 555 |
| SNGSARGDRQAL | 556 |
| SNGSARGDRQSL | 557 |
| SNGSARGDRQYL | 558 |
| SNGSGRGDRASL | 559 |
| SNGSGRGDRAYL | 560 |
| SNGSGRGDRGAL | 561 |
| SNGSGRGDRGSL | 562 |
| SNGSGRGDRGYL | 563 |
| SNGSGRGDRQAL | 564 |
| SNGSGRGDRQSL | 565 |
| SNGSGRGDRQYL | 566 |
| SNGSMRGDRAYL | 567 |
| SNGSMRGDRGYL | 568 |
| SNGSMRGDRQAL | 569 |
| SNGSMRGDRQSL | 570 |
| SNGSMRGDRQYL | 571 |
| SNGSSRGDRGYL | 572 |
| SNGSSRGDRQYL | 573 |
| SNGSTRGDRAAL | 574 |
| SNGSTRGDRASL | 575 |
| SNGSTRGDRGAL | 576 |
| SNGSTRGDRGYL | 577 |
| SNGSTRGDRQAL | 578 |
| SNGSTRGDRQSL | 579 |
| SNGSTRGDRQYL | 580 |
| SNGSVRGDRGYL | 581 |
| SNGSVRGDRQAL | 582 |
| SNGSVRGDRQSL | 583 |
| SNGSVRGDRQYL | 584 |
| SNSGMRGDRGAL | 585 |
| SNSSARGDRAYL | 586 |
| SNSSARGDRGAL | 587 |
| SNSSARGDRGIL | 588 |
| SNSSARGDRGSL | 589 |
| SNSSARGDRGYL | 590 |
| SNSSARGDRQAL | 591 |
| SNSSARGDRQSL | 592 |
| SNSSARGDRQYL | 593 |
| SNSSGRGDRAAL | 594 |
| SNSSGRGDRAYL | 595 |
| SNSSGRGDRGAL | 596 |
| SNSSGRGDRGSL | 597 |
| SNSSGRGDRGYL | 598 |
| SNSSGRGDRQAL | 599 |
| SNSSGRGDRQSL | 600 |
| SNSSGRGDRQYL | 601 |
| SNSSMRGDRAAL | 602 |
| SNSSMRGDRASL | 603 |
| SNSSMRGDRAYL | 604 |
| SNSSMRGDRGSL | 605 |
| SNSSMRGDRQAL | 606 |
| SNSSMRGDRQSL | 607 |
| SNSSMRGDRQYL | 608 |
| SNSSSRGDRAAL | 609 |
| SNSSSRGDRGSL | 610 |
| SNSSSRGDRQAL | 611 |
| SNSSSRGDRQSL | 612 |
| SNSSSRGDRQYL | 613 |
| SNSSTRGDRAAL | 614 |
| SNSSTRGDRASL | 615 |
| SNSSTRGDRGSL | 616 |
| SNSSTRGDRGYL | 617 |
| SNSSTRGDRQAL | 618 |
| SNSSTRGDRQSL | 619 |
| SNSSTRGDRQYL | 620 |
| SNSSVRGDRQAL | 621 |
| SNSSVRGDRQSL | 622 |
| SNSSVRGDRQYL | 623 |
| SNTSARGDRAAL | 624 |
| SNTSARGDRGAL | 625 |
| SNTSARGDRGSL | 626 |
| SNTSARGDRGYL | 627 |
| SNTSARGDRQAL | 628 |
| SNTSARGDRQSL | 629 |
| SNTSARGDRQYL | 630 |
| SNTSGRGDRAAL | 631 |
| SNTSGRGDRASL | 632 |
| SNTSGRGDRGAL | 633 |
| SNTSGRGDRGSL | 634 |
| SNTSGRGDRGYL | 635 |
| SNTSGRGDRQAL | 636 |
| SNTSGRGDRQSL | 637 |
| SNTSGRGDRQYL | 638 |
| SNTSMRGDRAYL | 639 |
| SNTSMRGDRGSL | 640 |
| SNTSMRGDRQAL | 641 |
| SNTSMRGDRQSL | 642 |
| SNTSSRGDRQAL | 643 |
| SNTSTRGDRQAL | 644 |
| SNTSTRGDRQSL | 645 |
| SNTSTRGDRQYL | 646 |
| SNTSVRGDRAYL | 647 |
| SNTSVRGDRQAL | 648 |
| SNTSVRGDRQSL | 649 |
| SNTSVRGDRQYL | 650 |
| SNYPHRGDRGAL | 651 |
| SNYSARGDRAAL | 652 |
| SNYSARGDRASL | 653 |
| SNYSARGDRGAL | 654 |
| SNYSARGDRGSL | 655 |
| SNYSARGDRQAL | 656 |
| SNYSARGDRQSL | 657 |
| SNYSARGDRQYL | 658 |
| SNYSGRGDRAAL | 659 |
| SNYSGRGDRGAL | 660 |
| SNYSGRGDRGSL | 661 |
| SNYSGRGDRQAL | 662 |
| SNYSGRGDRQSL | 663 |
| SNYSMRGDRAAL | 664 |
| SNYSMRGDRASL | 665 |
| SNYSMRGDRGSL | 666 |
| SNYSMRGDRQAL | 667 |
| SNYSMRGDRQSL | 668 |
| SNYSSRGDRGAL | 669 |
| SNYSSRGDRGSL | 670 |
| SNYSSRGDRQAL | 671 |
| SNYSSRGDRQSL | 672 |
| SNYSTRGDRAAL | 673 |
| SNYSTRGDRGAL | 674 |
| SNYSTRGDRGSL | 675 |
| SNYSTRGDRQAL | 676 |
| SNYSTRGDRQSL | 677 |
| SNYSTRGDRQYL | 678 |
| SNYSVRGDRQAL | 679 |
| SNYSVRGDRQSL | 680 |
| SNYSVRGDRQYL | 681 |
| TNSGMRGDRGAL | 682 |
| VNASARGDRAAL | 683 |
| VNASARGDRGAL | 684 |
| VNASARGDRGSL | 685 |
| VNASARGDRGYL | 686 |
| VNASARGDRQAL | 687 |
| VNASARGDRQYL | 688 |
| VNASGRGDRAAL | 689 |
| VNASGRGDRAYL | 690 |
| VNASGRGDRGAL | 691 |
| VNASGRGDRGSL | 692 |
| VNASGRGDRGYL | 693 |
| VNASGRGDRQAL | 694 |
| VNASGRGDRQYL | 695 |
| VNASMRGDRAYL | 696 |
| VNASMRGDRQAL | 697 |
| VNASMRGDRQSL | 698 |
| VNASSRGDRGSL | 699 |
| VNASSRGDRQAL | 700 |
| VNASSRGDRQYL | 701 |
| VNASTRGDRAAL | 702 |
| VNASTRGDRGAL | 703 |
| VNASTRGDRGSL | 704 |
| VNASTRGDRGYL | 705 |
| VNASTRGDRQAL | 706 |
| VNASTRGDRQSL | 707 |
| VNASTRGDRQYL | 708 |
| VNASVRGDRGSL | 709 |
| VNASVRGDRGYL | 710 |
| VNASVRGDRQAL | 711 |
| VNASVRGDRQSL | 712 |
| VNASVRGDRQYL | 713 |
| VNGNFRGDRQNL | 714 |
| VNGNVRGDRGML | 715 |
| VNGSARGDRAYL | 716 |
| VNGSARGDRGAL | 717 |
| VNGSARGDRGSL | 718 |
| VNGSARGDRGYL | 719 |
| VNGSARGDRQAL | 720 |
| VNGSARGDRQSL | 721 |
| VNGSARGDRQYL | 722 |
| VNGSGRGDRAAL | 723 |
| VNGSGRGDRASL | 724 |
| VNGSGRGDRAYL | 725 |
| VNGSGRGDRGAL | 726 |
| VNGSGRGDRGSL | 727 |
| VNGSGRGDRGYL | 728 |
| VNGSGRGDRQAL | 729 |
| VNGSGRGDRQSL | 730 |
| VNGSGRGDRQYL | 731 |
| VNGSMRGDRGYL | 732 |
| VNGSMRGDRQAL | 733 |
| VNGSMRGDRQSL | 734 |
| VNGSMRGDRQYL | 735 |
| VNGSSRGDRAYL | 736 |
| VNGSSRGDRGAL | 737 |
| VNGSSRGDRGSL | 738 |
| VNGSSRGDRQAL | 739 |
| VNGSSRGDRQSL | 740 |
| VNGSSRGDRQYL | 741 |
| VNGSTRGDRAAL | 742 |
| VNGSTRGDRAYL | 743 |
| VNGSTRGDRGAL | 744 |
| VNGSTRGDRGYL | 745 |
| VNGSTRGDRQAL | 746 |
| VNGSTRGDRQSL | 747 |
| VNGSTRGDRQYL | 748 |
| VNGSVRGDRAYL | 749 |
| VNGSVRGDRQAL | 750 |
| VNGSVRGDRQSL | 751 |
| VNGSVRGDRQYL | 752 |
| VNSGMRGDRGAL | 753 |
| VNSSARGDRGAL | 754 |
| VNSSARGDRGSL | 755 |
| VNSSARGDRGYL | 756 |
| VNSSARGDRQAL | 757 |
| VNSSARGDRQSL | 758 |
| VNSSARGDRQYL | 759 |
| VNSSGRGDRAAL | 760 |
| VNSSGRGDRAYL | 761 |
| VNSSGRGDRGAL | 762 |
| VNSSGRGDRQAL | 763 |
| VNSSGRGDRQSL | 764 |
| VNSSGRGDRQYL | 765 |
| VNSSMRGDRAYL | 766 |
| VNSSMRGDRQAL | 767 |
| VNSSMRGDRQSL | 768 |
| VNSSMRGDRQYL | 769 |
| VNSSSRGDRGSL | 770 |
| VNSSSRGDRQAL | 771 |
| VNSSSRGDRQSL | 772 |
| VNSSTRGDRGAL | 773 |
| VNSSTRGDRQAL | 774 |
| VNSSTRGDRQSL | 775 |
| VNSSTRGDRQYL | 776 |
| VNSSVRGDRAYL | 777 |
| VNSSVRGDRQAL | 778 |
| VNSSVRGDRQSL | 779 |
| VNTSARGDRAYL | 780 |
| VNTSGRGDRAAL | 781 |
| VNTSGRGDRGAL | 782 |
| VNTSGRGDRGSL | 783 |
| VNTSGRGDRGYL | 784 |
| VNTSGRGDRQAL | 785 |
| VNTSGRGDRQSL | 786 |
| VNTSGRGDRQYL | 787 |
| VNTSTRGDRAYL | 788 |
| VNYPHRGDRGAL | 789 |
| VNYSARGDRGAL | 790 |
| VNYSARGDRGSL | 791 |
| VNYSARGDRQAL | 792 |
| VNYSARGDRQSL | 793 |
| VNYSGRGDRAAL | 794 |
| VNYSGRGDRGAL | 795 |
| VNYSGRGDRQAL | 796 |
| VNYSGRGDRQSL | 797 |
| VNYSGRGDRQYL | 798 |
| VNYSSRGDRGSL | 799 |
| VNYSSRGDRGYL | 800 |

TABLE 1b
Split Amino Acid Sequences
from Table 1a

| 5 aa | SEQ ID | | SEQ ID |
|---|---|---|---|
| Substitution | NO: | 7 aa Insert | NO: |
| ANASA | 801 | RGDRAAL | 1600 |
| ANASA | 802 | RGDRGSL | 1601 |
| ANASA | 803 | RGDRGYL | 1602 |
| ANASA | 804 | RGDRQAL | 1603 |
| ANASA | 805 | RGDRQSL | 1604 |
| ANASA | 806 | RGDRQYL | 1605 |
| ANASG | 807 | RGDRAAL | 1606 |
| ANASG | 808 | RGDRASL | 1607 |
| ANASG | 809 | RGDRAYL | 1608 |
| ANASG | 810 | RGDRGAL | 1609 |
| ANASG | 811 | RGDRGSL | 1610 |
| ANASG | 812 | RGDRGYL | 1611 |
| ANASG | 813 | RGDRQAL | 1612 |
| ANASG | 814 | RGDRQSL | 1613 |
| ANASG | 815 | RGDRQYL | 1614 |
| ANASM | 816 | RGDRAAL | 1615 |
| ANASM | 817 | RGDRASL | 1616 |
| ANASM | 818 | RGDRAYL | 1617 |
| ANASM | 819 | RGDRQAL | 1618 |
| ANASM | 820 | RGDRQSL | 1619 |
| ANASS | 821 | RGDRGSL | 1620 |
| ANASS | 822 | RGDRGYL | 1621 |
| ANASS | 823 | RGDRQAL | 1622 |
| ANASS | 824 | RGDRQSL | 1623 |
| ANASS | 825 | RGDRQYL | 1624 |
| ANAST | 826 | RGDRASL | 1625 |
| ANAST | 827 | RGDRAYL | 1626 |
| ANAST | 828 | RGDRGAL | 1627 |
| ANAST | 829 | RGDRGSL | 1628 |
| ANAST | 830 | RGDRGYL | 1629 |
| ANAST | 831 | RGDRQAL | 1630 |
| ANAST | 832 | RGDRQSL | 1631 |
| ANAST | 833 | RGDRQYL | 1632 |
| ANASV | 834 | RGDRASL | 1633 |
| ANASV | 835 | RGDRGYL | 1634 |
| ANASV | 836 | RGDRQAL | 1635 |
| ANASV | 837 | RGDRQSL | 1636 |
| ANASV | 838 | RGDRQYL | 1637 |
| ANGNF | 839 | RGDRQNL | 1638 |
| ANGNV | 840 | RGDRGML | 1639 |
| ANGSA | 841 | RGDRAYL | 1640 |
| ANGSA | 842 | RGDRGSL | 1641 |
| ANGSA | 843 | RGDRGYL | 1642 |
| ANGSA | 844 | RGDRQAL | 1643 |
| ANGSA | 845 | RGDRQYL | 1644 |
| ANGSG | 846 | RGDRAAL | 1645 |
| ANGSG | 847 | RGDRAYL | 1646 |
| ANGSG | 848 | RGDRGAL | 1647 |
| ANGSG | 849 | RGDRGSL | 1648 |
| ANGSG | 850 | RGDRGYL | 1649 |
| ANGSG | 851 | RGDRQAL | 1650 |
| ANGSG | 852 | RGDRQSL | 1651 |
| ANGSG | 853 | RGDRQYL | 1652 |
| ANGSM | 854 | RGDRGYL | 1653 |
| ANGSM | 855 | RGDRQAL | 1654 |
| ANGSM | 856 | RGDRQSL | 1655 |
| ANGSM | 857 | RGDRQYL | 1656 |
| ANGSS | 858 | RGDRAYL | 1657 |
| ANGSS | 859 | RGDRGSL | 1658 |
| ANGSS | 860 | RGDRGYL | 1659 |
| ANGSS | 861 | RGDRQAL | 1660 |
| ANGSS | 862 | RGDRQSL | 1661 |
| ANGSS | 863 | RGDRQYL | 1662 |
| ANGST | 864 | RGDRAAL | 1663 |
| ANGST | 865 | RGDRAYL | 1664 |
| ANGST | 866 | RGDRGAL | 1665 |
| ANGST | 867 | RGDRGYL | 1666 |
| ANGST | 868 | RGDRQAL | 1667 |
| ANGST | 869 | RGDRQSL | 1668 |
| ANGST | 870 | RGDRQYL | 1669 |
| ANGSV | 871 | RGDRAYL | 1670 |
| ANGSV | 872 | RGDRGYL | 1671 |
| ANGSV | 873 | RGDRQAL | 1672 |
| ANGSV | 874 | RGDRQYL | 1673 |
| ANSGM | 875 | RGDRGAL | 1674 |
| ANSSA | 876 | RGDRGAL | 1675 |
| ANSSA | 877 | RGDRGSL | 1676 |
| ANSSA | 878 | RGDRGYL | 1677 |
| ANSSA | 879 | RGDRQAL | 1678 |
| ANSSA | 880 | RGDRQSL | 1679 |
| ANSSA | 881 | RGDRQYL | 1680 |
| ANSSG | 882 | RGDRAAL | 1681 |
| ANSSG | 883 | RGDRASL | 1682 |
| ANSSG | 884 | RGDRAYL | 1683 |
| ANSSG | 885 | RGDRGAL | 1684 |
| ANSSG | 886 | RGDRGSL | 1685 |
| ANSSG | 887 | RGDRGYL | 1686 |
| ANSSG | 888 | RGDRQAL | 1687 |
| ANSSG | 889 | RGDRQSL | 1688 |
| ANSSG | 890 | RGDRQYL | 1689 |
| ANSSM | 891 | RGDRAYL | 1690 |
| ANSSM | 892 | RGDRQAL | 1691 |
| ANSSM | 893 | RGDRQSL | 1692 |
| ANSSM | 894 | RGDRQYL | 1693 |
| ANSSS | 895 | RGDRGSL | 1694 |
| ANSSS | 896 | RGDRGYL | 1695 |
| ANSSS | 897 | RGDRQAL | 1696 |
| ANSSS | 898 | RGDRQSL | 1697 |
| ANSSS | 899 | RGDRQYL | 1698 |
| ANSST | 900 | RGDRAAL | 1699 |
| ANSST | 901 | RGDRGSL | 1700 |
| ANSST | 902 | RGDRQAL | 1701 |
| ANSST | 903 | RGDRQSL | 1702 |
| ANSST | 904 | RGDRQYL | 1703 |
| ANSSV | 905 | RGDRAYL | 1704 |
| ANSSV | 906 | RGDRGYL | 1705 |
| ANSSV | 907 | RGDRQAL | 1706 |
| ANSSV | 908 | RGDRQSL | 1707 |
| ANSSV | 909 | RGDRQYL | 1708 |
| ANTSA | 910 | RGDRAYL | 1709 |
| ANTSA | 911 | RGDRGAL | 1710 |
| ANTSA | 912 | RGDRGSL | 1711 |
| ANTSA | 913 | RGDRGYL | 1712 |
| ANTSA | 914 | RGDRQAL | 1713 |
| ANTSA | 915 | RGDRQYL | 1714 |
| ANTSG | 916 | RGDRASL | 1715 |
| ANTSG | 917 | RGDRGAL | 1716 |
| ANTSG | 918 | RGDRGSL | 1717 |
| ANTSG | 919 | RGDRGYL | 1718 |
| ANTSG | 920 | RGDRQAL | 1719 |
| ANTSG | 921 | RGDRQSL | 1720 |
| ANTSG | 922 | RGDRQYL | 1721 |
| ANTSM | 923 | RGDRAYL | 1722 |
| ANTSM | 924 | RGDRQAL | 1723 |
| ANTSM | 925 | RGDRQSL | 1724 |
| ANTSM | 926 | RGDRQYL | 1725 |
| ANTSS | 927 | RGDRGSL | 1726 |
| ANTSS | 928 | RGDRQAL | 1727 |
| ANTSS | 929 | RGDRQYL | 1728 |
| ANTST | 930 | RGDRAAL | 1729 |
| ANTST | 931 | RGDRQAL | 1730 |
| ANTST | 932 | RGDRQSL | 1731 |
| ANTST | 933 | RGDRQYL | 1732 |
| ANTSV | 934 | RGDRAYL | 1733 |
| ANTSV | 935 | RGDRGSL | 1734 |
| ANTSV | 936 | RGDRQAL | 1735 |
| ANTSV | 937 | RGDRQSL | 1736 |
| ANTSV | 938 | RGDRQYL | 1737 |
| ANYPH | 939 | RGDRGAL | 1738 |
| ANYSA | 940 | RGDRAAL | 1739 |
| ANYSA | 941 | RGDRASL | 1740 |
| ANYSA | 942 | RGDRGAL | 1741 |
| ANYSA | 943 | RGDRGSL | 1742 |
| ANYSA | 944 | RGDRQAL | 1743 |
| ANYSA | 945 | RGDRQSL | 1744 |
| ANYSG | 946 | RGDRAAL | 1745 |
| ANYSG | 947 | RGDRASL | 1746 |
| ANYSG | 948 | RGDRGAL | 1747 |
| ANYSG | 949 | RGDRGSL | 1748 |
| ANYSG | 950 | RGDRQAL | 1749 |
| ANYSG | 951 | RGDRQSL | 1750 |
| ANYSG | 952 | RGDRQYL | 1751 |
| ANYSM | 953 | RGDRAAL | 1752 |
| ANYSM | 954 | RGDRASL | 1753 |
| ANYSM | 955 | RGDRAYL | 1754 |
| ANYSM | 956 | RGDRQAL | 1755 |
| ANYSM | 957 | RGDRQSL | 1756 |
| ANYSS | 958 | RGDRGAL | 1757 |
| ANYSS | 959 | RGDRGSL | 1758 |
| ANYSS | 960 | RGDRQAL | 1759 |
| ANYSS | 961 | RGDRQSL | 1760 |
| ANYSS | 962 | RGDRQYL | 1761 |
| ANYST | 963 | RGDRQAL | 1762 |
| ANYST | 964 | RGDRQSL | 1763 |
| ANYST | 965 | RGDRQYL | 1764 |
| ANYSV | 966 | RGDRQAL | 1765 |
| ANYSV | 967 | RGDRQSL | 1766 |
| ANYSV | 968 | RGDRQYL | 1767 |
| FNSGM | 969 | RGDRGAL | 1768 |
| GNSGM | 970 | RGDRGAL | 1769 |
| HNSGM | 971 | RGDRGAL | 1770 |
| LNASA | 972 | RGDRAAL | 1771 |
| LNASA | 973 | RGDRASL | 1772 |
| LNASA | 974 | RGDRAYL | 1773 |
| LNASA | 975 | RGDRGAL | 1774 |
| LNASA | 976 | RGDRGSL | 1775 |
| LNASA | 977 | RGDRGYL | 1776 |
| LNASA | 978 | RGDRQAL | 1777 |
| LNASA | 979 | RGDRQSL | 1778 |
| LNASA | 980 | RGDRQYL | 1779 |
| LNASG | 981 | RGDRAAL | 1780 |
| LNASG | 982 | RGDRASL | 1781 |
| LNASG | 983 | RGDRAYL | 1782 |
| LNASG | 984 | RGDRGAL | 1783 |
| LNASG | 985 | RGDRGSL | 1784 |
| LNASG | 986 | RGDRGYL | 1785 |
| LNASG | 987 | RGDRQAL | 1786 |
| LNASG | 988 | RGDRQSL | 1787 |
| LNASG | 989 | RGDRQYL | 1788 |
| LNASI | 990 | RGDRQLL | 1789 |
| LNASM | 991 | RGDRAAL | 1790 |
| LNASM | 992 | RGDRASL | 1791 |
| LNASM | 993 | RGDRAYL | 1792 |
| LNASM | 994 | RGDRGAL | 1793 |
| LNASM | 995 | RGDRGSL | 1794 |
| LNASM | 996 | RGDRGYL | 1795 |
| LNASM | 997 | RGDRQAL | 1796 |
| LNASM | 998 | RGDRQSL | 1797 |
| LNASM | 999 | RGDRQYL | 1798 |
| LNASS | 1000 | RGDRAAL | 1799 |
| LNASS | 1001 | RGDRASL | 1800 |
| LNASS | 1002 | RGDRGAL | 1801 |
| LNASS | 1003 | RGDRGSL | 1802 |
| LNASS | 1004 | RGDRQAL | 1803 |
| LNASS | 1005 | RGDRQSL | 1804 |
| LNASS | 1006 | RGDRQYL | 1805 |
| LNAST | 1007 | RGDRAAL | 1806 |
| LNAST | 1008 | RGDRASL | 1807 |
| LNAST | 1009 | RGDRGAL | 1808 |
| LNAST | 1010 | RGDRGSL | 1809 |
| LNAST | 1011 | RGDRGYL | 1810 |
| LNAST | 1012 | RGDRQAL | 1811 |
| LNAST | 1013 | RGDRQSL | 1812 |
| LNAST | 1014 | RGDRQYL | 1813 |
| LNASV | 1015 | RGDRAAL | 1814 |
| LNASV | 1016 | RGDRASL | 1815 |
| LNASV | 1017 | RGDRGAL | 1816 |
| LNASV | 1018 | RGDRGSL | 1817 |
| LNASV | 1019 | RGDRQAL | 1818 |
| LNASV | 1020 | RGDRQSL | 1819 |
| LNASV | 1021 | RGDRQYL | 1820 |
| LNGNF | 1022 | RGDRQNL | 1821 |
| LNGNV | 1023 | RGDRGML | 1822 |
| LNGSA | 1024 | RGDRAAL | 1823 |
| LNGSA | 1025 | RGDRAYL | 1824 |
| LNGSA | 1026 | RGDRGSL | 1825 |
| LNGSA | 1027 | RGDRGYL | 1826 |
| LNGSA | 1028 | RGDRQAL | 1827 |
| LNGSA | 1029 | RGDRQSL | 1828 |
| LNGSA | 1030 | RGDRQYL | 1829 |
| LNGSG | 1031 | RGDRAAL | 1830 |
| LNGSG | 1032 | RGDRAYL | 1831 |
| LNGSG | 1033 | RGDRGAL | 1832 |
| LNGSG | 1034 | RGDRGSL | 1833 |
| LNGSG | 1035 | RGDRGYL | 1834 |
| LNGSG | 1036 | RGDRQAL | 1835 |
| LNGSG | 1037 | RGDRQYL | 1836 |
| LNGSM | 1038 | RGDRASL | 1837 |
| LNGSM | 1039 | RGDRGYL | 1838 |
| LNGSM | 1040 | RGDRQAL | 1839 |
| LNGSM | 1041 | RGDRQSL | 1840 |
| LNGSM | 1042 | RGDRQYL | 1841 |
| LNGSS | 1043 | RGDRAAL | 1842 |
| LNGSS | 1044 | RGDRAYL | 1843 |
| LNGSS | 1045 | RGDRGAL | 1844 |
| LNGSS | 1046 | RGDRQYL | 1845 |
| LNGST | 1047 | RGDRAAL | 1846 |
| LNGST | 1048 | RGDRASL | 1847 |
| LNGST | 1049 | RGDRAYL | 1848 |
| LNGST | 1050 | RGDRGAL | 1849 |
| LNGST | 1051 | RGDRGSL | 1850 |
| LNGST | 1052 | RGDRGYL | 1851 |
| LNGST | 1053 | RGDRQAL | 1852 |
| LNGST | 1054 | RGDRQSL | 1853 |
| LNGST | 1055 | RGDRQYL | 1854 |
| LNGSV | 1056 | RGDRASL | 1855 |
| LNGSV | 1057 | RGDRAYL | 1856 |
| LNGSV | 1058 | RGDRGYL | 1857 |
| LNGSV | 1059 | RGDRQAL | 1858 |
| LNGSV | 1060 | RGDRQSL | 1859 |
| LNGSV | 1061 | RGDRQYL | 1860 |
| LNSGM | 1062 | RGDRGAL | 1861 |
| LNSSA | 1063 | RGDRASL | 1862 |
| LNSSA | 1064 | RGDRAYL | 1863 |
| LNSSA | 1065 | RGDRGAL | 1864 |
| LNSSA | 1066 | RGDRGIL | 1865 |
| LNSSA | 1067 | RGDRGSL | 1866 |
| LNSSA | 1068 | RGDRGYL | 1867 |
| LNSSA | 1069 | RGDRQAL | 1868 |
| LNSSA | 1070 | RGDRQSL | 1869 |
| LNSSA | 1071 | RGDRQYL | 1870 |
| LNSSG | 1072 | RGDRAAL | 1871 |
| LNSSG | 1073 | RGDRASL | 1872 |
| LNSSG | 1074 | RGDRAYL | 1873 |
| LNSSG | 1075 | RGDRGAL | 1874 |
| LNSSG | 1076 | RGDRGSL | 1875 |
| LNSSG | 1077 | RGDRGYL | 1876 |
| LNSSG | 1078 | RGDRQAL | 1877 |
| LNSSG | 1079 | RGDRQSL | 1878 |
| LNSSG | 1080 | RGDRQYL | 1879 |
| LNSSM | 1081 | RGDRAAL | 1880 |
| LNSSM | 1082 | RGDRASL | 1881 |
| LNSSM | 1083 | RGDRAYL | 1882 |
| LNSSM | 1084 | RGDRGAL | 1883 |
| LNSSM | 1085 | RGDRGSL | 1884 |
| LNSSM | 1086 | RGDRQAL | 1885 |
| LNSSM | 1087 | RGDRQSL | 1886 |
| LNSSM | 1088 | RGDRQYL | 1887 |
| LNSSS | 1089 | RGDRAAL | 1888 |
| LNSSS | 1090 | RGDRGAL | 1889 |
| LNSSS | 1091 | RGDRGSL | 1890 |
| LNSSS | 1092 | RGDRQAL | 1891 |
| LNSSS | 1093 | RGDRQSL | 1892 |
| LNSSS | 1094 | RGDRQYL | 1893 |
| LNSST | 1095 | RGDRAAL | 1894 |
| LNSST | 1096 | RGDRASL | 1895 |
| LNSST | 1097 | RGDRGAL | 1896 |
| LNSST | 1098 | RGDRGSL | 1897 |
| LNSST | 1099 | RGDRQAL | 1898 |
| LNSST | 1100 | RGDRQSL | 1899 |
| LNSST | 1101 | RGDRQYL | 1900 |
| LNSSV | 1102 | RGDRAAL | 1901 |
| LNSSV | 1103 | RGDRASL | 1902 |
| LNSSV | 1104 | RGDRGAL | 1903 |
| LNSSV | 1105 | RGDRGSL | 1904 |
| LNSSV | 1106 | RGDRGYL | 1905 |
| LNSSV | 1107 | RGDRQAL | 1906 |
| LNSSV | 1108 | RGDRQSL | 1907 |
| LNSSV | 1109 | RGDRQYL | 1908 |
| LNTSA | 1110 | RGDRAAL | 1909 |
| LNTSA | 1111 | RGDRASL | 1910 |
| LNTSA | 1112 | RGDRAYL | 1911 |
| LNTSA | 1113 | RGDRGAL | 1912 |
| LNTSA | 1114 | RGDRGSL | 1913 |
| LNTSA | 1115 | RGDRGYL | 1914 |
| LNTSA | 1116 | RGDRQAL | 1915 |
| LNTSA | 1117 | RGDRQSL | 1916 |
| LNTSA | 1118 | RGDRQYL | 1917 |
| LNTSG | 1119 | RGDRAAL | 1918 |
| LNTSG | 1120 | RGDRASL | 1919 |
| LNTSG | 1121 | RGDRAYL | 1920 |
| LNTSG | 1122 | RGDRGAL | 1921 |
| LNTSG | 1123 | RGDRGSL | 1922 |
| LNTSG | 1124 | RGDRGYL | 1923 |
| LNTSG | 1125 | RGDRQAL | 1924 |
| LNTSG | 1126 | RGDRQSL | 1925 |
| LNTSG | 1127 | RGDRQYL | 1926 |
| LNTSM | 1128 | RGDRAAL | 1927 |
| LNTSM | 1129 | RGDRASL | 1928 |
| LNTSM | 1130 | RGDRAYL | 1929 |
| LNTSM | 1131 | RGDRGAL | 1930 |
| LNTSM | 1132 | RGDRGSL | 1931 |
| LNTSM | 1133 | RGDRQAL | 1932 |
| LNTSM | 1134 | RGDRQSL | 1933 |
| LNTSM | 1135 | RGDRQYL | 1934 |
| LNTSS | 1136 | RGDRAAL | 1935 |
| LNTSS | 1137 | RGDRGSL | 1936 |
| LNTSS | 1138 | RGDRQAL | 1937 |
| LNTSS | 1139 | RGDRQSL | 1938 |
| LNTSS | 1140 | RGDRQYL | 1939 |
| LNTST | 1141 | RGDRAAL | 1940 |
| LNTST | 1142 | RGDRASL | 1941 |
| LNTST | 1143 | RGDRGAL | 1942 |
| LNTST | 1144 | RGDRGSL | 1943 |
| LNTST | 1145 | RGDRQAL | 1944 |
| LNTST | 1146 | RGDRQSL | 1945 |
| LNTST | 1147 | RGDRQYL | 1946 |
| LNTSV | 1148 | RGDRAAL | 1947 |
| LNTSV | 1149 | RGDRASL | 1948 |
| LNTSV | 1150 | RGDRAYL | 1949 |
| LNTSV | 1151 | RGDRGAL | 1950 |
| LNTSV | 1152 | RGDRGSL | 1951 |
| LNTSV | 1153 | RGDRQAL | 1952 |
| LNTSV | 1154 | RGDRQSL | 1953 |
| LNYPH | 1155 | RGDRGAL | 1954 |
| LNYSA | 1156 | RGDRGAL | 1955 |
| LNYSA | 1157 | RGDRGSL | 1956 |
| LNYSA | 1158 | RGDRQAL | 1957 |
| LNYSA | 1159 | RGDRQSL | 1958 |
| LNYSA | 1160 | RGDRQYL | 1959 |
| LNYSG | 1161 | RGDRAAL | 1960 |
| LNYSG | 1162 | RGDRASL | 1961 |
| LNYSG | 1163 | RGDRGAL | 1962 |
| LNYSG | 1164 | RGDRGSL | 1963 |
| LNYSG | 1165 | RGDRQAL | 1964 |
| LNYSG | 1166 | RGDRQSL | 1965 |
| LNYSG | 1167 | RGDRQYL | 1966 |
| LNYSM | 1168 | RGDRQAL | 1967 |
| LNYSM | 1169 | RGDRQSL | 1968 |
| LNYSS | 1170 | RGDRGAL | 1969 |
| LNYSS | 1171 | RGDRGSL | 1970 |
| LNYSS | 1172 | RGDRQAL | 1971 |
| LNYSS | 1173 | RGDRQSL | 1972 |
| LNYSS | 1174 | RGDRQYL | 1973 |
| LNYST | 1175 | RGDRASL | 1974 |
| LNYST | 1176 | RGDRGAL | 1975 |
| LNYST | 1177 | RGDRGSL | 1976 |
| LNYST | 1178 | RGDRQAL | 1977 |
| LNYST | 1179 | RGDRQSL | 1978 |
| LNYST | 1180 | RGDRQYL | 1979 |
| LNYSV | 1181 | RGDRQAL | 1980 |
| LNYSV | 1182 | RGDRQSL | 1981 |
| MNASA | 1183 | RGDRAAL | 1982 |
| MNASA | 1184 | RGDRAYL | 1983 |
| MNASA | 1185 | RGDRGSL | 1984 |
| MNASA | 1186 | RGDRGYL | 1985 |
| MNASA | 1187 | RGDRQAL | 1986 |
| MNASA | 1188 | RGDRQSL | 1987 |
| MNASA | 1189 | RGDRQYL | 1988 |
| MNASG | 1190 | RGDRAAL | 1989 |
| MNASG | 1191 | RGDRASL | 1990 |
| MNASG | 1192 | RGDRAYL | 1991 |
| MNASG | 1193 | RGDRGSL | 1992 |
| MNASG | 1194 | RGDRQAL | 1993 |
| MNASG | 1195 | RGDRQSL | 1994 |
| MNASG | 1196 | RGDRQYL | 1995 |
| MNASI | 1197 | RGDRQLL | 1996 |
| MNASM | 1198 | RGDRAAL | 1997 |
| MNASM | 1199 | RGDRAYL | 1998 |
| MNASM | 1200 | RGDRGAL | 1999 |
| MNASM | 1201 | RGDRQAL | 2000 |
| MNASM | 1202 | RGDRQSL | 2001 |
| MNASS | 1203 | RGDRAAL | 2002 |
| MNAST | 1204 | RGDRAAL | 2003 |
| MNAST | 1205 | RGDRASL | 2004 |
| MNAST | 1206 | RGDRAYL | 2005 |
| MNAST | 1207 | RGDRGAL | 2006 |
| MNAST | 1208 | RGDRGSL | 2007 |
| MNAST | 1209 | RGDRQAL | 2008 |
| MNAST | 1210 | RGDRQSL | 2009 |
| MNAST | 1211 | RGDRQYL | 2010 |
| MNASV | 1212 | RGDRAAL | 2011 |
| MNASV | 1213 | RGDRASL | 2012 |
| MNASV | 1214 | RGDRAYL | 2013 |
| MNASV | 1215 | RGDRQAL | 2014 |
| MNASV | 1216 | RGDRQSL | 2015 |
| MNASV | 1217 | RGDRQYL | 2016 |
| MNGNF | 1218 | RGDRQNL | 2017 |
| MNGSA | 1219 | RGDRAYL | 2018 |
| MNGSA | 1220 | RGDRGYL | 2019 |
| MNGSA | 1221 | RGDRQAL | 2020 |
| MNGSA | 1222 | RGDRQSL | 2021 |
| MNGSA | 1223 | RGDRQYL | 2022 |
| MNGSG | 1224 | RGDRAAL | 2023 |
| MNGSG | 1225 | RGDRAYL | 2024 |
| MNGSG | 1226 | RGDRGAL | 2025 |
| MNGSG | 1227 | RGDRGSL | 2026 |
| MNGSG | 1228 | RGDRGYL | 2027 |
| MNGSG | 1229 | RGDRQAL | 2028 |
| MNGSG | 1230 | RGDRQSL | 2029 |
| MNGSG | 1231 | RGDRQYL | 2030 |
| MNGSM | 1232 | RGDRQAL | 2031 |
| MNGSM | 1233 | RGDRQSL | 2032 |
| MNGSM | 1234 | RGDRQYL | 2033 |
| MNGSS | 1235 | RGDRQYL | 2034 |
| MNGST | 1236 | RGDRAYL | 2035 |
| MNGST | 1237 | RGDRGAL | 2036 |
| MNGST | 1238 | RGDRGYL | 2037 |
| MNGST | 1239 | RGDRQAL | 2038 |
| MNGST | 1240 | RGDRQSL | 2039 |
| MNGST | 1241 | RGDRQYL | 2040 |
| MNGSV | 1242 | RGDRGYL | 2041 |
| MNGSV | 1243 | RGDRQAL | 2042 |
| MNGSV | 1244 | RGDRQYL | 2043 |
| MNSGM | 1245 | RGDRGAL | 2044 |
| MNSSA | 1246 | RGDRAAL | 2045 |
| MNSSA | 1247 | RGDRAYL | 2046 |
| MNSSA | 1248 | RGDRGSL | 2047 |
| MNSSA | 1249 | RGDRGYL | 2048 |
| MNSSA | 1250 | RGDRQAL | 2049 |
| MNSSA | 1251 | RGDRQSL | 2050 |
| MNSSA | 1252 | RGDRQYL | 2051 |
| MNSSG | 1253 | RGDRAAL | 2052 |
| MNSSG | 1254 | RGDRASL | 2053 |
| MNSSG | 1255 | RGDRAYL | 2054 |
| MNSSG | 1256 | RGDRGAL | 2055 |
| MNSSG | 1257 | RGDRGSL | 2056 |
| MNSSG | 1258 | RGDRQAL | 2057 |
| MNSSG | 1259 | RGDRQSL | 2058 |
| MNSSG | 1260 | RGDRQYL | 2059 |
| MNSSM | 1261 | RGDRAAL | 2060 |
| MNSSM | 1262 | RGDRASL | 2061 |
| MNSSM | 1263 | RGDRAYL | 2062 |
| MNSSM | 1264 | RGDRGSL | 2063 |
| MNSSM | 1265 | RGDRQAL | 2064 |
| MNSSM | 1266 | RGDRQSL | 2065 |
| MNSSM | 1267 | RGDRQYL | 2066 |
| MNSSS | 1268 | RGDRAAL | 2067 |
| MNSST | 1269 | RGDRAAL | 2068 |
| MNSST | 1270 | RGDRASL | 2069 |
| MNSST | 1271 | RGDRQAL | 2070 |
| MNSST | 1272 | RGDRQSL | 2071 |
| MNSST | 1273 | RGDRQYL | 2072 |
| MNSSV | 1274 | RGDRAAL | 2073 |
| MNSSV | 1275 | RGDRAYL | 2074 |
| MNSSV | 1276 | RGDRQAL | 2075 |
| MNSSV | 1277 | RGDRQSL | 2076 |
| MNSSV | 1278 | RGDRQYL | 2077 |
| MNTSA | 1279 | RGDRAYL | 2078 |
| MNTSG | 1280 | RGDRAAL | 2079 |
| MNTSG | 1281 | RGDRQAL | 2080 |
| MNTSG | 1282 | RGDRQYL | 2081 |
| MNTSM | 1283 | RGDRAYL | 2082 |
| MNTST | 1284 | RGDRQYL | 2083 |
| MNYPH | 1285 | RGDRGAL | 2084 |
| MNYSA | 1286 | RGDRAAL | 2085 |
| MNYSA | 1287 | RGDRGYL | 2086 |
| MNYSA | 1288 | RGDRQAL | 2087 |
| MNYSA | 1289 | RGDRQSL | 2088 |
| MNYSG | 1290 | RGDRAAL | 2089 |
| MNYSG | 1291 | RGDRASL | 2090 |
| MNYSG | 1292 | RGDRGSL | 2091 |
| MNYSG | 1293 | RGDRQAL | 2092 |
| MNYSG | 1294 | RGDRQSL | 2093 |
| MNYSS | 1295 | RGDRQAL | 2094 |
| MNYST | 1296 | RGDRAAL | 2095 |
| MNYST | 1297 | RGDRQAL | 2096 |
| MNYST | 1298 | RGDRQSL | 2097 |
| MNYST | 1299 | RGDRQYL | 2098 |
| NNSGM | 1300 | RGDRGAL | 2099 |
| QNSGM | 1301 | RGDRGAL | 2100 |
| SNASA | 1302 | RGDRAAL | 2101 |
| SNASA | 1303 | RGDRASL | 2102 |
| SNASA | 1304 | RGDRAYL | 2103 |
| SNASA | 1305 | RGDRGAL | 2104 |
| SNASA | 1306 | RGDRGSL | 2105 |
| SNASA | 1307 | RGDRGYL | 2106 |
| SNASA | 1308 | RGDRQAL | 2107 |
| SNASA | 1309 | RGDRQSL | 2108 |
| SNASA | 1310 | RGDRQYL | 2109 |
| SNASG | 1311 | RGDRAAL | 2110 |
| SNASG | 1312 | RGDRASL | 2111 |
| SNASG | 1313 | RGDRAYL | 2112 |
| SNASG | 1314 | RGDRGAL | 2113 |
| SNASG | 1315 | RGDRGSL | 2114 |
| SNASG | 1316 | RGDRGYL | 2115 |
| SNASG | 1317 | RGDRQAL | 2116 |
| SNASG | 1318 | RGDRQSL | 2117 |
| SNASG | 1319 | RGDRQYL | 2118 |
| SNASI | 1320 | RGDRQLL | 2119 |
| SNASM | 1321 | RGDRAAL | 2120 |
| SNASM | 1322 | RGDRASL | 2121 |
| SNASM | 1323 | RGDRGAL | 2122 |
| SNASM | 1324 | RGDRGSL | 2123 |
| SNASM | 1325 | RGDRQAL | 2124 |
| SNASM | 1326 | RGDRQSL | 2125 |
| SNASS | 1327 | RGDRAAL | 2126 |
| SNASS | 1328 | RGDRASL | 2127 |
| SNASS | 1329 | RGDRAYL | 2128 |
| SNASS | 1330 | RGDRGAL | 2129 |
| SNASS | 1331 | RGDRGSL | 2130 |
| SNASS | 1332 | RGDRQAL | 2131 |
| SNASS | 1333 | RGDRQSL | 2132 |
| SNASS | 1334 | RGDRQYL | 2133 |
| SNAST | 1335 | RGDRAAL | 2134 |
| SNAST | 1336 | RGDRASL | 2135 |
| SNAST | 1337 | RGDRAYL | 2136 |
| SNAST | 1338 | RGDRGAL | 2137 |
| SNAST | 1339 | RGDRGSL | 2138 |
| SNAST | 1340 | RGDRGYL | 2139 |
| SNAST | 1341 | RGDRQAL | 2140 |
| SNAST | 1342 | RGDRQSL | 2141 |
| SNAST | 1343 | RGDRQYL | 2142 |
| SNASV | 1344 | RGDRAAL | 2143 |
| SNASV | 1345 | RGDRASL | 2144 |
| SNASV | 1346 | RGDRAYL | 2145 |
| SNASV | 1347 | RGDRGSL | 2146 |
| SNASV | 1348 | RGDRGYL | 2147 |
| SNASV | 1349 | RGDRQAL | 2148 |
| SNASV | 1350 | RGDRQSL | 2149 |
| SNASV | 1351 | RGDRQYL | 2150 |
| SNGNF | 1352 | RGDRQNL | 2151 |
| SNGNV | 1353 | RGDRGML | 2152 |
| SNGSA | 1354 | RGDRGYL | 2153 |
| SNGSA | 1355 | RGDRQAL | 2154 |
| SNGSA | 1356 | RGDRQSL | 2155 |
| SNGSA | 1357 | RGDRQYL | 2156 |
| SNGSG | 1358 | RGDRASL | 2157 |
| SNGSG | 1359 | RGDRAYL | 2158 |
| SNGSG | 1360 | RGDRGAL | 2159 |
| SNGSG | 1361 | RGDRGSL | 2160 |
| SNGSG | 1362 | RGDRGYL | 2161 |
| SNGSG | 1363 | RGDRQAL | 2162 |
| SNGSG | 1364 | RGDRQSL | 2163 |
| SNGSG | 1365 | RGDRQYL | 2164 |
| SNGSM | 1366 | RGDRAYL | 2165 |
| SNGSM | 1367 | RGDRGYL | 2166 |
| SNGSM | 1368 | RGDRQAL | 2167 |
| SNGSM | 1369 | RGDRQSL | 2168 |
| SNGSM | 1370 | RGDRQYL | 2169 |
| SNGSS | 1371 | RGDRGYL | 2170 |
| SNGSS | 1372 | RGDRQYL | 2171 |
| SNGST | 1373 | RGDRAAL | 2172 |
| SNGST | 1374 | RGDRASL | 2173 |
| SNGST | 1375 | RGDRGAL | 2174 |
| SNGST | 1376 | RGDRGYL | 2175 |
| SNGST | 1377 | RGDRQAL | 2176 |
| SNGST | 1378 | RGDRQSL | 2177 |
| SNGST | 1379 | RGDRQYL | 2178 |
| SNGSV | 1380 | RGDRGYL | 2179 |
| SNGSV | 1381 | RGDRQAL | 2180 |
| SNGSV | 1382 | RGDRQSL | 2181 |
| SNGSV | 1383 | RGDRQYL | 2182 |
| SNSGM | 1384 | RGDRGAL | 2183 |
| SNSSA | 1385 | RGDRAYL | 2184 |
| SNSSA | 1386 | RGDRGAL | 2185 |
| SNSSA | 1387 | RGDRGIL | 2186 |
| SNSSA | 1388 | RGDRGSL | 2187 |
| SNSSA | 1389 | RGDRGYL | 2188 |
| SNSSA | 1390 | RGDRQAL | 2189 |
| SNSSA | 1391 | RGDRQSL | 2190 |
| SNSSA | 1392 | RGDRQYL | 2191 |
| SNSSG | 1393 | RGDRAAL | 2192 |
| SNSSG | 1394 | RGDRAYL | 2193 |
| SNSSG | 1395 | RGDRGAL | 2194 |
| SNSSG | 1396 | RGDRGSL | 2195 |
| SNSSG | 1397 | RGDRGYL | 2196 |
| SNSSG | 1398 | RGDRQAL | 2197 |
| SNSSG | 1399 | RGDRQSL | 2198 |
| SNSSG | 1400 | RGDRQYL | 2199 |
| SNSSM | 1401 | RGDRAAL | 2200 |
| SNSSM | 1402 | RGDRASL | 2201 |
| SNSSM | 1403 | RGDRAYL | 2202 |
| SNSSM | 1404 | RGDRGSL | 2203 |
| SNSSM | 1405 | RGDRQAL | 2204 |
| SNSSM | 1406 | RGDRQSL | 2205 |
| SNSSM | 1407 | RGDRQYL | 2206 |
| SNSSS | 1408 | RGDRAAL | 2207 |
| SNSSS | 1409 | RGDRGSL | 2208 |
| SNSSS | 1410 | RGDRQAL | 2209 |
| SNSSS | 1411 | RGDRQSL | 2210 |
| SNSSS | 1412 | RGDRQYL | 2211 |
| SNSST | 1413 | RGDRAAL | 2212 |
| SNSST | 1414 | RGDRASL | 2213 |
| SNSST | 1415 | RGDRGSL | 2214 |
| SNSST | 1416 | RGDRGYL | 2215 |
| SNSST | 1417 | RGDRQAL | 2216 |
| SNSST | 1418 | RGDRQSL | 2217 |
| SNSST | 1419 | RGDRQYL | 2218 |
| SNSSV | 1420 | RGDRQAL | 2219 |
| SNSSV | 1421 | RGDRQSL | 2220 |
| SNSSV | 1422 | RGDRQYL | 2221 |
| SNTSA | 1423 | RGDRAAL | 2222 |
| SNTSA | 1424 | RGDRGAL | 2223 |
| SNTSA | 1425 | RGDRGSL | 2224 |
| SNTSA | 1426 | RGDRGYL | 2225 |
| SNTSA | 1427 | RGDRQAL | 2226 |
| SNTSA | 1428 | RGDRQSL | 2227 |
| SNTSA | 1429 | RGDRQYL | 2228 |
| SNTSG | 1430 | RGDRAAL | 2229 |
| SNTSG | 1431 | RGDRASL | 2230 |
| SNTSG | 1432 | RGDRGAL | 2231 |
| SNTSG | 1433 | RGDRGSL | 2232 |
| SNTSG | 1434 | RGDRGYL | 2233 |
| SNTSG | 1435 | RGDRQAL | 2234 |
| SNTSG | 1436 | RGDRQSL | 2235 |
| SNTSG | 1437 | RGDRQYL | 2236 |
| SNTSM | 1438 | RGDRAYL | 2237 |
| SNTSM | 1439 | RGDRGSL | 2238 |
| SNTSM | 1440 | RGDRQAL | 2239 |
| SNTSM | 1441 | RGDRQSL | 2240 |
| SNTSS | 1442 | RGDRQAL | 2241 |
| SNTST | 1443 | RGDRQAL | 2242 |
| SNTST | 1444 | RGDRQSL | 2243 |
| SNTST | 1445 | RGDRQYL | 2244 |
| SNTSV | 1446 | RGDRAYL | 2245 |
| SNTSV | 1447 | RGDRQAL | 2246 |
| SNTSV | 1448 | RGDRQSL | 2247 |
| SNTSV | 1449 | RGDRQYL | 2248 |
| SNYPH | 1450 | RGDRGAL | 2249 |
| SNYSA | 1451 | RGDRAAL | 2250 |
| SNYSA | 1452 | RGDRASL | 2251 |
| SNYSA | 1453 | RGDRGAL | 2252 |
| SNYSA | 1454 | RGDRGSL | 2253 |
| SNYSA | 1455 | RGDRQAL | 2254 |
| SNYSA | 1456 | RGDRQSL | 2255 |
| SNYSA | 1457 | RGDRQYL | 2256 |
| SNYSG | 1458 | RGDRAAL | 2257 |
| SNYSG | 1459 | RGDRGAL | 2258 |
| SNYSG | 1460 | RGDRGSL | 2259 |
| SNYSG | 1461 | RGDRQAL | 2260 |
| SNYSG | 1462 | RGDRQSL | 2261 |
| SNYSM | 1463 | RGDRAAL | 2262 |
| SNYSM | 1464 | RGDRASL | 2263 |
| SNYSM | 1465 | RGDRGSL | 2264 |
| SNYSM | 1466 | RGDRQAL | 2265 |
| SNYSM | 1467 | RGDRQSL | 2266 |
| SNYSS | 1468 | RGDRGAL | 2267 |
| SNYSS | 1469 | RGDRGSL | 2268 |
| SNYSS | 1470 | RGDRQAL | 2269 |
| SNYSS | 1471 | RGDRQSL | 2270 |
| SNYST | 1472 | RGDRAAL | 2271 |
| SNYST | 1473 | RGDRGAL | 2272 |
| SNYST | 1474 | RGDRGSL | 2273 |
| SNYST | 1475 | RGDRQAL | 2274 |
| SNYST | 1476 | RGDRQSL | 2275 |
| SNYST | 1477 | RGDRQYL | 2276 |
| SNYSV | 1478 | RGDRQAL | 2277 |
| SNYSV | 1479 | RGDRQSL | 2278 |
| SNYSV | 1480 | RGDRQYL | 2279 |
| TNSGM | 1481 | RGDRGAL | 2280 |
| VNASA | 1482 | RGDRAAL | 2281 |
| VNASA | 1483 | RGDRGAL | 2282 |
| VNASA | 1484 | RGDRGSL | 2283 |
| VNASA | 1485 | RGDRGYL | 2284 |
| VNASA | 1486 | RGDRQAL | 2285 |
| VNASA | 1487 | RGDRQYL | 2286 |
| VNASG | 1488 | RGDRAAL | 2287 |
| VNASG | 1489 | RGDRAYL | 2288 |
| VNASG | 1490 | RGDRGAL | 2289 |
| VNASG | 1491 | RGDRGSL | 2290 |
| VNASG | 1492 | RGDRGYL | 2291 |
| VNASG | 1493 | RGDRQAL | 2292 |
| VNASG | 1494 | RGDRQYL | 2293 |
| VNASM | 1495 | RGDRAYL | 2294 |
| VNASM | 1496 | RGDRQAL | 2295 |
| VNASM | 1497 | RGDRQSL | 2296 |
| VNASS | 1498 | RGDRGSL | 2297 |
| VNASS | 1499 | RGDRQAL | 2298 |
| VNASS | 1500 | RGDRQYL | 2299 |
| VNAST | 1501 | RGDRAAL | 2300 |
| VNAST | 1502 | RGDRGAL | 2301 |
| VNAST | 1503 | RGDRGSL | 2302 |
| VNAST | 1504 | RGDRGYL | 2303 |
| VNAST | 1505 | RGDRQAL | 2304 |
| VNAST | 1506 | RGDRQSL | 2305 |
| VNAST | 1507 | RGDRQYL | 2306 |
| VNASV | 1508 | RGDRGSL | 2307 |
| VNASV | 1509 | RGDRGYL | 2308 |
| VNASV | 1510 | RGDRQAL | 2309 |
| VNASV | 1511 | RGDRQSL | 2310 |
| VNASV | 1512 | RGDRQYL | 2311 |
| VNGNF | 1513 | RGDRQNL | 2312 |
| VNGNV | 1514 | RGDRGML | 2313 |
| VNGSA | 1515 | RGDRAYL | 2314 |
| VNGSA | 1516 | RGDRGAL | 2315 |
| VNGSA | 1517 | RGDRGSL | 2316 |
| VNGSA | 1518 | RGDRGYL | 2317 |
| VNGSA | 1519 | RGDRQAL | 2318 |
| VNGSA | 1520 | RGDRQSL | 2319 |
| VNGSA | 1521 | RGDRQYL | 2320 |
| VNGSG | 1522 | RGDRAAL | 2321 |
| VNGSG | 1523 | RGDRASL | 2322 |
| VNGSG | 1524 | RGDRAYL | 2323 |
| VNGSG | 1525 | RGDRGAL | 2324 |
| VNGSG | 1526 | RGDRGSL | 2325 |
| VNGSG | 1527 | RGDRGYL | 2326 |
| VNGSG | 1528 | RGDRQAL | 2327 |
| VNGSG | 1529 | RGDRQSL | 2328 |
| VNGSG | 1530 | RGDRQYL | 2329 |
| VNGSM | 1531 | RGDRGYL | 2330 |
| VNGSM | 1532 | RGDRQAL | 2331 |
| VNGSM | 1533 | RGDRQSL | 2332 |
| VNGSM | 1534 | RGDRQYL | 2333 |
| VNGSS | 1535 | RGDRAYL | 2334 |
| VNGSS | 1536 | RGDRGAL | 2335 |
| VNGSS | 1537 | RGDRGSL | 2336 |
| VNGSS | 1538 | RGDRQAL | 2337 |
| VNGSS | 1539 | RGDRQSL | 2338 |
| VNGSS | 1540 | RGDRQYL | 2339 |
| VNGST | 1541 | RGDRAAL | 2340 |
| VNGST | 1542 | RGDRAYL | 2341 |
| VNGST | 1543 | RGDRGAL | 2342 |
| VNGST | 1544 | RGDRGYL | 2343 |
| VNGST | 1545 | RGDRQAL | 2344 |
| VNGST | 1546 | RGDRQSL | 2345 |
| VNGST | 1547 | RGDRQYL | 2346 |
| VNGSV | 1548 | RGDRAYL | 2347 |
| VNGSV | 1549 | RGDRQAL | 2348 |
| VNGSV | 1550 | RGDRQSL | 2349 |
| VNGSV | 1551 | RGDRQYL | 2350 |
| VNSGM | 1552 | RGDRGAL | 2351 |
| VNSSA | 1553 | RGDRGAL | 2352 |
| VNSSA | 1554 | RGDRGSL | 2353 |
| VNSSA | 1555 | RGDRGYL | 2354 |
| VNSSA | 1556 | RGDRQAL | 2355 |
| VNSSA | 1557 | RGDRQSL | 2356 |
| VNSSA | 1558 | RGDRQYL | 2357 |
| VNSSG | 1559 | RGDRAAL | 2358 |
| VNSSG | 1560 | RGDRAYL | 2359 |
| VNSSG | 1561 | RGDRGAL | 2360 |
| VNSSG | 1562 | RGDRQAL | 2361 |
| VNSSG | 1563 | RGDRQSL | 2362 |
| VNSSG | 1564 | RGDRQYL | 2363 |
| VNSSM | 1565 | RGDRAYL | 2364 |
| VNSSM | 1566 | RGDRQAL | 2365 |
| VNSSM | 1567 | RGDRQSL | 2366 |
| VNSSM | 1568 | RGDRQYL | 2367 |
| VNSSS | 1569 | RGDRGSL | 2368 |
| VNSSS | 1570 | RGDRQAL | 2369 |
| VNSSS | 1571 | RGDRQSL | 2370 |
| VNSST | 1572 | RGDRGAL | 2371 |
| VNSST | 1573 | RGDRQAL | 2372 |
| VNSST | 1574 | RGDRQSL | 2373 |
| VNSST | 1575 | RGDRQYL | 2374 |
| VNSSV | 1576 | RGDRAYL | 2375 |
| VNSSV | 1577 | RGDRQAL | 2376 |
| VNSSV | 1578 | RGDRQSL | 2377 |
| VNTSA | 1579 | RGDRAYL | 2378 |
| VNTSG | 1580 | RGDRAAL | 2379 |
| VNTSG | 1581 | RGDRGAL | 2380 |
| VNTSG | 1582 | RGDRGSL | 2381 |
| VNTSG | 1583 | RGDRGYL | 2382 |
| VNTSG | 1584 | RGDRQAL | 2383 |
| VNTSG | 1585 | RGDRQSL | 2384 |
| VNTSG | 1586 | RGDRQYL | 2385 |
| VNTST | 1587 | RGDRAYL | 2386 |
| VNYPH | 1588 | RGDRGAL | 2387 |
| VNYSA | 1589 | RGDRGAL | 2388 |
| VNYSA | 1590 | RGDRGSL | 2389 |
| VNYSA | 1591 | RGDRQAL | 2390 |
| VNYSA | 1592 | RGDRQSL | 2391 |
| VNYSG | 1593 | RGDRAAL | 2392 |
| VNYSG | 1594 | RGDRGAL | 2393 |
| VNYSG | 1595 | RGDRQAL | 2394 |
| VNYSG | 1596 | RGDRQSL | 2395 |
| VNYSG | 1597 | RGDRQYL | 2396 |
| VNYSS | 1598 | RGDRGSL | 2397 |
| VNYSS | 1599 | RGDRGYL | 2398 |

### BRIEF DESCRIPTION OF THE DRAWINGS

[0230] FIGS. 1A-1B show results from analysis of microdystrophin expression in quadriceps from B10-mdx mice dosed with either Composition 1 (4E13 vg/kg) or Reference AAV composition (1.33E14 vg/kg). FIG. 1A shows images of FLAG immunofluorescence of microdystrophin expression in B10-mdx mouse quadriceps following administration of Composition 1 or Reference AAV composition. FIG. 1B shows results from capillary electrophoresis quantifying microdystrophin expression in B10-mdx mouse quadriceps following administration of Composition 1 or Reference AAV composition.

[0231] FIGS. 2A-2B show results from analysis of microdystrophin expression in triceps from B10-mdx mice dosed with either Composition 1 (4E13 vg/kg) or Reference AAV composition (1.33E14 vg/kg). FIG. 2A shows images of FLAG immunofluorescence of microdystrophin expression in B10-mdx mouse triceps following administration of Composition 1 or Reference AAV composition. FIG. 2B shows results from capillary electrophoresis quantifying microdystrophin expression in B10-mdx mouse triceps following administration of Composition 1 or Reference AAV composition.

[0232] FIGS. 3A-3B show results from analysis of microdystrophin expression in heart tissue from B10-mdx mice dosed with either Composition 1 (4E13 vg/kg) or Reference AAV composition (1.33E14 vg/kg). FIG. 3A shows images of FLAG immunofluorescence of microdystrophin expression in B10-mdx mouse hearts following administration of Composition 1 or Reference AAV composition. FIG. 3B shows results from capillary electrophoresis quantifying microdystrophin expression in B10-mouse hearts following administration of Composition 1 or Reference AAV composition.

[0233] FIGS. 4A-4C show results from analysis of microdystrophin expression and muscle physiology in B10-mdx mice dosed with either Composition 1 (4E13 vg/kg) or Reference AAV composition (1.33E14 vg/kg). FIG. 4A shows a graph of specific force of muscles from B10-mice following administration of Composition 1 or Reference AAV composition.

[0234] FIG. 4B shows a graph of percent force drop after eccentric damage, which demonstrates protection against eccentric damage, in muscles from B10-mice following administration of Composition 1 or Reference AAV composition. FIG. 4C shows results from capillary electrophoresis quantifying microdystrophin expression in mouse EDL muscle following administration of Composition 1 or Reference AAV composition.

[0235] FIGS. 5A-5B show results from analysis of microdystrophin expression in heart left ventricles from NHP dosed with either Composition 1 (4E13 vg/kg) or Reference AAV composition (1.33E14 vg/kg). FIG. 5A shows images of FLAG immunofluorescence of microdystrophin expression in NHP heart left ventricles following administration of Composition 1 or Reference AAV composition. FIG. 5B shows results from capillary electrophoresis quantifying microdystrophin expression in NHP heart left ventricles following administration of Composition 1 or Reference AAV composition.

[0236] FIGS. 6A-6B show results from analysis of microdystrophin expression in heart right ventricles from NHP dosed with either Composition 1 (4E13 vg/kg) or Reference AAV composition (1.33E14 vg/kg). FIG. 6A shows images of FLAG immunofluorescence of microdystrophin expression in NHP heart right ventricles following administration of Composition 1 or Reference AAV composition. FIG. 6B shows results from capillary electrophoresis quantifying microdystrophin expression in NHP heart right ventricles following administration of Composition 1 or Reference AAV composition.

[0237] FIGS. 7A-7B show results from analysis of microdystrophin expression in heart interventricular septum from NHP dosed with either Composition 1 (4E13 vg/kg) or Reference AAV composition (1.33E14 vg/kg). FIG. 7A shows images of FLAG immunofluorescence of microdystrophin expression in NHP heart interventricular septum following administration of Composition 1 or Reference AAV composition. FIG. 7B shows results from capillary electrophoresis quantifying microdystrophin expression in NHP heart interventricular septum following administration of Composition 1 or Reference AAV composition.

[0238] FIGS. 8A-8B show results from analysis of microdystrophin expression in gastrocnemius from NHP dosed with either Composition 1 (4E13 vg/kg) or Reference AAV composition (1.33E14 vg/kg). FIG. 8A shows images of FLAG immunofluorescence of microdystrophin expression in NHP gastrocnemius following administration of Composition 1 or Reference AAV composition. FIG. 8B shows results from capillary electrophoresis quantifying microdystrophin expression in NHP gastrocnemius following administration of Composition 1 or Reference AAV composition.

[0239] FIGS. 9A-9B show results from analysis of microdystrophin expression in pectoralis major from NHP dosed with either Composition 1 (4E13 vg/kg) or Reference AAV composition (1.33E14 vg/kg). FIG. 9A shows images of FLAG immunofluorescence of microdystrophin expression in NHP pectoralis major following administration of Composition 1 or Reference AAV composition. FIG. 9B shows results from capillary electrophoresis quantifying microdystrophin expression in NHP pectoralis major following administration of Composition 1 or Reference AAV composition.

[0240] FIGS. 10A-10B show results from analysis of microdystrophin expression in diaphragm from NHP dosed with either Composition 1 (4E13 vg/kg) or Reference AAV composition (1.33E14 vg/kg). FIG. 10A shows images of FLAG immunofluorescence of microdystrophin expression in NHP diaphragm following administration of Composition 1 or Reference AAV composition. FIG. 10B shows results from capillary electrophoresis quantifying microdystrophin expression in NHP diaphragm following administration of Composition 1 or Reference AAV composition.

[0241] FIG. 11 shows a graph of vector genome detected in the liver of NHPs.

[0242] FIG. 12 shows representative images of FLAG immunofluorescence of diaphragm, quadriceps, heart, and extensor digitorum longus (EDL) tissue of D2-mdx mice treated with Composition 1. Mice were dosed with either a low (1E13 vg/kg), a mid (2E13 vg/kg), or high (4E13 vg/kg) dose of Composition 1. WT mice and D2-mdx mice were treated with vehicle as a control. Tissues were analyzed 7 weeks post-injection.

[0243] FIGS. 13A-13B show results from capillary electrophoresis analysis of microdystrophin expression in D2-mdx mouse heart at 7 weeks (FIG. 13A) and 22 weeks (FIG. 13B) post-injection of Composition 1. Mice were dosed with either a low (1E13 vg/kg), a mid (2E13 vg/kg), or high (4E13 vg/kg) dose of Composition 1. WT mice and D2-mdx mice were treated with vehicle as a control.

[0244] FIGS. 14A-14B show results from capillary electrophoresis analysis of microdystrophin expression in D2-mdx mouse skeletal muscle at 7 weeks (FIG. 13A) and 22 weeks (FIG. 13B) post-injection of Composition 1 or Reference AAV composition. Mice were dosed with either a low (1E13 vg/kg), a mid (2E13 vg/kg), or high (4E13 vg/kg) dose of Composition 1. WT mice and D2-mdx mice were treated with vehicle as a control.

[0245] FIGS. 15A-15B show a graph of body weight of D2-mdx mice dosed with either a low (1E13 vg/kg), a mid (2E13 vg/kg), or high (4E13 vg/kg) dose of Composition 1. Body weight was measured pre-dose and monitored twice weekly throughout the 7 weeks (FIG. 15A) and 22 weeks (FIG. 15B) study cohorts. WT mice and D2-mdx mice were treated with vehicle as a control. Error bars are mean±standard deviation.

[0246] FIGS. 16A-16B show a graph of body weight and tibialis anterior (TA) muscle weight of D2-mdx mice dosed with either a low (1E13 vg/kg), a mid (2E13 vg/kg), or high (4E13 vg/kg) dose of Composition 1. Body weight and TA weight was measured pre-dose and monitored twice weekly throughout the 7 weeks (FIG. 16A) and 22 weeks (FIG. 16B) study cohorts. WT mice and D2-mdx mice were treated with vehicle as a control. Error bars are mean±standard deviation. Asterisks indicate statistical differences from mdx-vehicle mice (*p<0.05; ** p<0.01; **** p<0.0001).

[0247] FIGS. 17A-17E show results from physiological analysis of D2-mdx mice dosed with either a low (1E13 vg/kg), a mid (2E13 vg/kg), or high (4E13 vg/kg) dose of Composition 1. WT mice and D2-mdx mice were treated with vehicle as a control. Tissues were analyzed 7 weeks post-injection. Error bars are mean±standard deviation. Asterisks, indicate statistical differences from mdx-vehicle mice (*p<0.05; ** P<0.01; *** p<0.001; **** p<0.0001; lack of asterisks indicates non-significance). (#), indicate WT-vehicle statistical differences from mdx-vehicle mice. (*), indicate WT-vehicle and Composition 1 statistical differences from mdx-vehicle mice. FIG. 17A shows graphs of anatomical properties of EDL muscle, including EDL weight (left panel), optimal length (Lo; middle panel), and cross-sectional area (CSA; right panel). FIG. 17B shows graphs of quantitative measurements of muscle contractility in EDL muscle, including specific twitch force (sPt; left panel) and specific tetanic force (sPo; right panel). FIG. 17C shows a graph of eccentric contraction of EDL muscle. FIG. 17D shows a graph of the stress-strain relationship to evaluate the elastic properties of EDL muscle. FIG. 17E shows a graph of the stress relaxation rate to evaluate the viscous properties of EDL muscle.

[0248] FIGS. 18A-18E show results from physiological analysis of D2-mdx mice dosed with either a low (1E13 vg/kg), a mid (2E13 vg/kg), or high (4E13 vg/kg) dose of Composition 1. WT mice and D2-mdx mice were treated with vehicle as a control. Tissues were analyzed 22 weeks post-injection. Error bars are mean±standard deviation. Asterisks, indicate statistical differences from mdx-vehicle mice (*p<0.05; ** P<0.01; *** p<0.001; **** p<0.0001; lack of asterisks indicates non-significance). (#), indicate WT-vehicle statistical differences from mdx-vehicle mice. (†), indicate WT-vehicle and Composition 1 statistical differences from mdx-vehicle mice. FIG. 18A shows graphs of anatomical properties of EDL muscle, including EDL weight (left panel), optimal length (Lo; middle panel), and cross-sectional area (CSA; right panel). FIG. 18B shows graphs of quantitative measurements of muscle contractility in EDL muscle, including specific twitch force (sPt; left panel) and specific tetanic force (sPo; right panel). FIG. 18C shows a graph of eccentric contraction of EDL muscle. FIG. 18D shows a graph of the stress-strain relationship to evaluate the elastic properties of EDL muscle. FIG. 18E shows a graph of the stress relaxation rate to evaluate the viscous properties of EDL muscle.

[0249] FIGS. 19A-19C show graphs of mRNA levels of microdystrophin-FLAG in heart (FIG. 19A), skeletal muscle (FIG. 19B), and off-target tissues (FIG. 19C) from NHPs dosed with 4E13 vg/kg of Composition 1. Tissues were analyzed 28 days post-injection. The transcript copy was normalized to nhpRPL30 (n=3/group). Error bars are mean±standard deviation. Avg.: average value; Sk.: skeletal; DRG: dorsal root ganglion.

[0250] FIG. 20 shows representative images of FLAG immunofluorescence of heart and skeletal muscle from NHPs dosed with 4E13 vg/kg of Composition 1. Tissues were analyzed 28 days post-injection.

[0251] FIGS. 21A-21B show results from capillary electrophoresis analysis of microdystrophin expression in heart (FIG. 21A) and skeletal muscle (FIG. 21B) from NHPs dosed with 4E13 vg/kg of Composition 1. Tissues were analyzed at 28 days or 90-days post-injection. The amount of the microdystrophin expressed in tissues was calculated by interpolation to the full-length dystrophin standard curve derived from normal human heart or skeletal muscle samples.

[0252] FIGS. 22A-22B show results from capillary electrophoresis analysis of microdystrophin expression from an endogenous coding sequence or a codon optimized microdystrophin sequence (v1, v2, or v3) in C2C12 derived myotubes.

[0253] FIGS. 23A-23B show results from capillary electrophoresis analysis of microdystrophin expression from an endogenous coding sequence or a codon optimized microdystrophin sequence (v1, v2, or v3) in human primary myotubes.

[0254] FIGS. 24A-24C show results from analysis of microdystrophin expression in gastrocnemius from NHP dosed with MyoAAV-LD A- or AAV9-CBh-uDys-FLAG. FIG. 24A shows images of FLAG immunofluorescence of microdystrophin expression in NHP gastrocnemius following administration of MyoAAV-LD A- or AAV9-CBh-uDys-FLAG.

[0255] FIG. 24B shows results from capillary electrophoresis quantifying microdystrophin expression in NHP gastrocnemius following administration of MyoAAV-LD A- or AAV9-CBh-uDys-FLAG. FIG. 24C shows a graph of mRNA levels of microdystrophin in gastrocnemius from NHP dosed with MyoAAV-LD A- or AAV9-CBh-uDys-FLAG.]

[0256] FIGS. 25A-25C show results from analysis of microdystrophin expression in triceps from NHP dosed with MyoAAV-LD A- or AAV9-CBh-uDys-FLAG. FIG. 25A shows images of FLAG immunofluorescence of microdystrophin expression in NHP triceps following administration of MyoAAV-LD A- or AAV9-CBh-uDys-FLAG. FIG. 25B shows results from capillary electrophoresis quantifying microdystrophin expression in NHP triceps following administration of MyoAAV-LD A- or AAV9-CBh-uDys-FLAG. FIG. 25C shows a graph of mRNA levels of microdystrophin in triceps from NHP dosed with MyoAAV-LD A- or AAV9-CBh-uDys-FLAG.

[0257] FIGS. 26A-26C show results from analysis of microdystrophin expression in biceps brachii from NHP dosed with MyoAAV-LD A- or AAV9-CBh-uDys-FLAG. FIG. 26A shows images of FLAG immunofluorescence of microdystrophin expression in NHP biceps brachii following administration of MyoAAV-LD A- or AAV9-CBh-uDys-FLAG. FIG. 26B shows results from capillary electrophoresis quantifying microdystrophin expression in NHP biceps brachii following administration of MyoAAV-LD A- or AAV9-CBh-uDys-FLAG. FIG. 26C shows a graph of mRNA levels of microdystrophin in biceps brachii from NHP dosed with MyoAAV-LD A- or AAV9-CBh-uDys-FLAG.

[0258] FIGS. 27A-27C show results from analysis of microdystrophin expression in pectoralis major from NHP dosed with MyoAAV-LD A- or AAV9-CBh-uDys-FLAG. FIG. 27A shows images of FLAG immunofluorescence of microdystrophin expression in NHP pectoralis major following administration of MyoAAV-LD A- or AAV9-CBh-uDys-FLAG. FIG. 27B shows results from capillary electrophoresis quantifying microdystrophin expression in NHP pectoralis major brachii following administration of MyoAAV-LD A- or AAV9-CBh-uDys-FLAG. FIG. 27C shows a graph of mRNA levels of microdystrophin in pectoralis major from NHP dosed with MyoAAV-LD A- or AAV9-CBh-uDys-FLAG.

[0259] FIGS. 28A-28B show results from analysis of muscle physiology in B10-mdx mice dosed with DMD tool compound (2E13 vg/kg). FIG. 28A shows a graph of specific force following administration of the DMD tool compound to WT and mdx mice. FIG. 28B shows a graph of protection against eccentric damage following administration of the DMD tool compound to WT and mdx mice. *: WT significantly different from mdx, #: Mdx significantly different from mdx+tool compound, ‡: WT significantly different from mdx+tool compound.

### DETAILED DESCRIPTION

[0260] The present invention provides novel engineered nucleic acids encoding microdystrophin proteins for use in gene therapy.

[0261] Specifically, aspects of the invention provide a formulation comprising an AAV particle comprising (e.g., encapsidating) a nucleic acid comprising a promoter and a sequence encoding microdystrophin.

[0262] Aspects of the invention provide a composition comprising an adeno-associated virus (AAV) particle comprising an engineered capsid protein comprising the amino acid sequence RGDR (SEQ ID NO: 2440). The capsid protein encapsidates a nucleic acid molecule (e.g., a cargo) comprising a promoter, a codon optimized microdystrophin sequence, for example, a sequence having at least 95% sequence identity with a sequence selected from any one of SEQ ID NOs: 2405-2407. The nucleic acid may further comprise a dorsal root ganglia (DRG) de-targeting miRNA binding site.

### DMD Gene

[0263] The DMD gene is the largest known human gene. The most common mutations that cause DMD are large deletion mutations of one or more exons (60-70%), however duplication mutations (5-10%), and single nucleotide variants (25-35%), can also cause pathogenic dystrophin variants. In DMD, mutations often lead to a frame shift resulting in a premature stop codon and a truncated, non-functional or unstable protein. Nonsense point mutations can also result in premature termination codons with the same result. While mutations causing DMD can affect any exon, exons 2-20 and 45-55 are common hotspots for large deletion and duplication mutations.

[0264] Full-length dystrophin is a large (427 kDa) protein comprising a number of subdomains that contribute to its function. These subdomains include, in order from the amino-terminus toward the carboxy-terminus, the N-terminal actin-binding domain, a central so-called “rod” domain, a cysteine-rich domain and lastly a carboxy-terminal domain or region. The rod domain is comprised of 4 proline-rich hinge domains (abbreviated H), and 24 spectrin-like repeats (abbreviated R) in the following order: a first hinge domain (H1), 3 spectrin-like repeats (R1, R2, R3), a second hinge domain (H2), 16 more spectrin-like repeats (R4, R5, R6, R7, R8, R9, R10, R11, R12, R13, R14, R15, R16, R17, R18, R19), a third hinge domain (H3), 5 more spectrin-like repeats (R20, R21, R22, R23, R24), and a fourth hinge domain (H4) (including the WW domain). Following the rod domain are the cysteine-rich domain, and the COOH (C)-terminal (CT) domain.

### Optimized Nucleic Acid Sequences

[0265] Optimized nucleic acid sequences of the invention may include codon-optimization, which refers to a gene coding sequence that has been optimized to increase expression by substituting one or more codons normally present in a coding sequence with a codon for the same amino acid. In this manner, the protein encoded by the gene is identical, but the underlying nucleobase sequence of the gene or corresponding mRNA is different. In some embodiments, the optimization substitutes one or more rare codons (that is, codons for tRNA that occur relatively infrequently in cells from a particular species) with synonymous codons that occur more frequently to improve the efficiency of translation. For example, in human codon-optimization one or more codons in a coding sequence are replaced by codons that occur more frequently in human cells for the same amino acid. Codon optimization can also increase gene expression through other mechanisms that can improve efficiency of transcription and/or translation. Strategies include, without limitation, increasing total GC content (that is, the percent of guanines and cytosines in the entire coding sequence), decreasing CpG content (that is, the number of CG or GC dinucleotides in the coding sequence), removing cryptic splice donor or acceptor sites, and/or adding or removing ribosomal entry sites, such as Kozak sequences. Desirably, a codon-optimized gene exhibits improved protein expression, for example, the protein encoded thereby is expressed at a detectably greater level in a cell compared with the level of expression of the protein provided by the wild type gene in an otherwise similar cell.

[0266] Sequence identity for a nucleic acid or amino acid sequence, for example an optimized nucleic acid, refers has the standard meaning in the art.

[0267] A percent nucleic acid sequence identity refers to the percentage of nucleotide residues in the candidate sequence that are identical with the nucleotides in the polynucleotide specifically disclosed herein. The alignment may include the introduction of gaps in the sequences to be aligned. In addition, for sequences which contain either more or fewer nucleotides than the polynucleotides specifically disclosed herein, it is understood that in one embodiment, the percentage of sequence identity will be determined based on the number of identical nucleotides in relation to the total number of nucleotides. Thus, for example, sequence identity of sequences shorter than a sequence specifically disclosed herein, will be determined using the number of nucleotides in the shorter sequence, in one embodiment. In percent identity calculations relative weight is not assigned to various manifestations of sequence variation, such as insertions, deletions, substitutions, etc.

[0268] Aa number of different programs can be used to identify whether a polynucleotide or polypeptide has sequence identity or similarity to a known sequence. Sequence identity or similarity may be determined using standard techniques known in the art, including, but not limited to the BLAST algorithm, described in Altschul et al., J Mol. Biol. 215:403 (1990) and Karlin et al., Proc. Natl. Acad. Sci. USA 90:5873 (1993).

### Micro RNA

[0269] MicroRNAs are small, single-stranded, non-coding RNA molecules. miRNAs base-pair to complementary sequences in mRNA molecules, thereby producing post-transcriptional regulation of gene expression. Typically, miRNA molecules silence messenger RNA (mRNA) translation by facilitating a process that leads to cleavage of mRNA strand into two pieces or destabilization of the mRNA by shortening its poly (A) tail. miRNAs are typically ˜22 nt and are expressed in a cell and tissue type specific manner.

[0270] miRNAs resemble small interfering RNAs (siRNAs), however miRNAs derive from regions of RNA transcripts that fold back on themselves to form short hairpins. Animal miRNAs are initially transcribed as part of one arm of an RNA stem-loop that in turn forms part of a several hundred nucleotide-long miRNA precursor termed a pri-miRNA. A single pri-miRNA may contain from one to six miRNA precursors. These hairpin loop structures are typically composed of about 70 nucleotides each. Each hairpin is flanked by sequences necessary for efficient processing.

[0271] The pre-miRNA hairpin is typically cleaved by the RNase enzyme Dicer. The RNase interacts with 5′ and 3′ ends of the hairpin and cuts away the loop joining the 3′ and 5′ arms, resulting in a miRNA: miRNA duplex about 22 nucleotides in length. Overall hairpin length and loop size influence the efficiency of Dicer processing. Although either strand of the duplex may potentially act as a functional miRNA, only one strand is generally incorporated into the RNA-induced silencing complex (RISC) where the miRNA and its mRNA target interact.

[0272] The present invention provides miR-338-3p, miR-138-5p, and miR-9-5p functional sites that inhibit expression of a transgene to selectively inhibit expression of the transgene in the dorsal root ganglia (DRG).

### I. Recombinant Nucleic Acids

[0273] Aspects of the present disclosure provide a recombinant nucleic acid comprising a muscle specific promoter, a sequence encoding microdystrophin, and at least one DRG de-targeting miRNA binding site. In some embodiments, the recombinant nucleic acid can further comprise an intron and/or a Poly A signal. Alternatively, or in addition to, the recombinant nucleic acid can further comprise a 5′ inverted terminal repeat (ITR) and a 3′ ITR.

[0274] Various promoters, including inducible promoters and constitutive promoters, can be used to drive expression from the recombinant nucleic acids described herein. Non-limiting examples of promoters that can be used in the recombinant nucleic acids disclosed herein include a cytomegalovirus (CMV) promoter, a chicken β-actin (CBA) promoter, an alpha-1 antitrypsin (hAAT) promoter, and any promoter derived from an immunoglobulin gene, SV40, or other tissue specific genes.

[0275] In some embodiments, the promoter is tissue-specific such that, in a multi-cellular organism, the promoter drives expression only in a subset of specific cells. For example, the promoter is a muscle specific promoter. Non-limiting examples of muscle specific promoters include a CK8 promoter, a desmin promoter, a Mb promoter, a MCK promoter, a MHCK7 promoter, a skeletal muscle alpha actin promoter, or a TTNI2 promoter.

[0276] In some embodiments, the promoter is a novel promoter described herein. For example, the promoter comprises or consists of a nucleic acid sequence that is at least 85%, at least 86%, at least 87%, at least 88%, at least 89%, at least 90%, at least 91%, at least 92%, at least 93%, at least 94%, at least 95%, at least 96%, at least 97%, at least 98%, or at least 99% identical to the nucleic acid sequence of any one of SEQ ID NOs: 2402-2404. In another example, the promoter comprises or consists of the nucleic acid sequence of any one of SEQ ID NOs: 2402-2404. In some embodiments, the recombinant nucleic acid comprises or consists of the nucleic acid sequence of SEQ ID NO: 2402. In some embodiments, the recombinant nucleic acid comprises or consists of the nucleic acid sequence of SEQ ID NO: 2403. In some embodiments, the recombinant nucleic acid comprises or consists of the nucleic acid sequence of SEQ ID NO: 2404.

[0277] Recombinant nucleic acids described herein comprise a sequence encoding microdystrophin (e.g., a sequence encoding human microdystrophin). Upon administration of any of the recombinant nucleic acids described herein, microdystrophin protein (e.g., any biologically active fragment of dystrophin, e.g., ΔR4-R23/ΔCT microdystrophin) is expressed in muscle cells or muscle tissue to produce a therapeutic effect.

[0278] In some embodiments, the microdystrophin protein can comprise or consist of an amino acid sequence that is at least 85%, at least 86%, at least 87%, at least 88%, at least 89%, at least 90%, at least 91%, at least 92%, at least 93%, at least 94%, at least 95%, at least 96%, at least 97%, at least 98%, or at least 99% identical to SEQ ID NO: 2439. In some embodiments, the microdystrophin protein comprises or consists of the amino acid sequence of SEQ ID NO: 2439.

[0279] The sequence encoding microdystrophin can be an endogenous sequence encoding micodystrophin or a codon optimized sequence encoding microdystrophin such as the codon optimized sequences encoding microdystrophin provided as SEQ ID NOs: 2405-2407.

[0280] In some embodiments, the sequence encoding microdystrophin comprises or consists of a nucleic acid sequence that is at least 85%, at least 86%, at least 87%, at least 88%, at least 89%, at least 90%, at least 91%, at least 92%, at least 93%, at least 94%, at least 95%, at least 96%, at least 97%, at least 98%, or at least 99% identical to the nucleic acid sequence of SEQ ID NO: 2405. In some embodiments, the sequence encoding microdystrophin comprises or consists of the nucleic acid sequence of SEQ ID NO: 2405.

[0281] In some embodiments, the sequence encoding microdystrophin comprises or consists of a nucleic acid sequence that is at least 85%, at least 86%, at least 87%, at least 88%, at least 89%, at least 90%, at least 91%, at least 92%, at least 93%, at least 94%, at least 95%, at least 96%, at least 97%, at least 98%, or at least 99% identical to the nucleic acid sequence of SEQ ID NO: 2406. In some embodiments, the sequence encoding microdystrophin comprises or consists of the nucleic acid sequence of SEQ ID NO: 2406.

[0282] In some embodiments, the sequence encoding microdystrophin comprises or consists of a nucleic acid sequence that is at least 85%, at least 86%, at least 87%, at least 88%, at least 89%, at least 90%, at least 91%, at least 92%, at least 93%, at least 94%, at least 95%, at least 96%, at least 97%, at least 98%, or at least 99% identical to the nucleic acid sequence of SEQ ID NO: 2407. In some embodiments, the sequence encoding microdystrophin comprises or consists of the nucleic acid sequence of SEQ ID NO: 2407.

[0283] Any of the sequences encoding microdystrophin described herein can produce a microdystrophin protein that retains its biological activity (e.g., muscle membrane stabilization).

[0284] For example, the sequence encoding microdystrophin comprises or consists of a nucleic acid sequence that is at least 85%, at least 86%, at least 87%, at least 88%, at least 89%, at least 90%, at least 91%, at least 92%, at least 93%, at least 94%, at least 95%, at least 96%, at least 97%, at least 98%, or at least 99% identical to the nucleic acid sequence of SEQ ID NO: 2405, and microdystrophin retains biological activity (e.g., muscle membrane stabilization). In another example, the sequence encoding microdystrophin comprises or consists of the nucleic acid sequence of SEQ ID NO: 2405, and microdystrophin retains biological activity (e.g., muscle membrane stabilization).

[0285] In another example, the sequence encoding microdystrophin comprises or consists of a nucleic acid sequence that is at least 85%, at least 86%, at least 87%, at least 88%, at least 89%, at least 90%, at least 91%, at least 92%, at least 93%, at least 94%, at least 95%, at least 96%, at least 97%, at least 98%, or at least 99% identical to the nucleic acid sequence of SEQ ID NO: 2406, and microdystrophin retains biological activity (e.g., muscle membrane stabilization). In another example, the sequence encoding microdystrophin comprises or consists of the nucleic acid sequence of SEQ ID NO: 2406, and microdystrophin retains biological activity (e.g., muscle membrane stabilization).

[0286] In yet another example, the sequence encoding microdystrophin comprises or consists of a nucleic acid sequence that is at least 85%, at least 86%, at least 87%, at least 88%, at least 89%, at least 90%, at least 91%, at least 92%, at least 93%, at least 94%, at least 95%, at least 96%, at least 97%, at least 98%, or at least 99% identical to the nucleic acid sequence of SEQ ID NO: 2407, and microdystrophin retains biological activity (e.g., muscle membrane stabilization). In another example, the sequence encoding microdystrophin comprises or consists of the nucleic acid sequence of SEQ ID NO: 2407, and microdystrophin retains biological activity (e.g., muscle membrane stabilization).

[0287] Recombinant nucleic acids described herein can comprise at least one DRG de-targeting miRNA binding site, e.g., at least one, at least two, at least three, at least four, at least five, or more DRG de-targeting miRNA binding sites.

[0288] Any DRG de-targeting miRNA binding site suitable for binding a DRG de-targeting miRNA can be included in the recombinant nucleic acids described herein. In some embodiments, the DRG de-targeting miRNA binding site can comprise or consist of a binding site for miR-338 (e.g., miR-338-3p), miR-138 (e.g., miR-138-5p), or miR-9 (e.g., miR-9-5p).

[0289] In some embodiments, the DRG de-targeting miRNA binding site comprises or consists of a nucleic acid sequence that is at least 85%, at least 86%, at least 87%, at least 88%, at least 89%, at least 90%, at least 91%, at least 92%, at least 93%, at least 94%, at least 95%, at least 96%, at least 97%, at least 98%, or at least 99% identical to the nucleic acid sequence of any one of SEQ ID NOs: 2399-2401. In some embodiments, the DRG de-targeting miRNA binding site comprises or consists of the nucleic acid sequence of any one of SEQ ID NOs: 2399-2401.

[0290] In some embodiments, the DRG de-targeting miRNA binding site comprises or consists of a nucleic acid sequence that is at least 85%, at least 86%, at least 87%, at least 88%, at least 89%, at least 90%, at least 91%, at least 92%, at least 93%, at least 94%, at least 95%, at least 96%, at least 97%, at least 98%, or at least 99% identical to the nucleic acid sequence of SEQ ID NO: 2399. In some embodiments, the DRG de-targeting miRNA binding site comprises or consists of the nucleic acid sequence of SEQ ID NOs: 2399.

[0291] In some embodiments, the DRG de-targeting miRNA binding site comprises or consists of a nucleic acid sequence that is at least 85%, at least 86%, at least 87%, at least 88%, at least 89%, at least 90%, at least 91%, at least 92%, at least 93%, at least 94%, at least 95%, at least 96%, at least 97%, at least 98%, or at least 99% identical to the nucleic acid sequence of SEQ ID NO: 2400. In some embodiments, the DRG de-targeting miRNA binding site comprises or consists of the nucleic acid sequence of SEQ ID NOs: 2400.

[0292] In some embodiments, the DRG de-targeting miRNA binding site comprises or consists of a nucleic acid sequence that is at least 85%, at least 86%, at least 87%, at least 88%, at least 89%, at least 90%, at least 91%, at least 92%, at least 93%, at least 94%, at least 95%, at least 96%, at least 97%, at least 98%, or at least 99% identical to the nucleic acid sequence of SEQ ID NO: 2401. In some embodiments, the DRG de-targeting miRNA binding site comprises or consists of the nucleic acid sequence of SEQ ID NOs: 2401.

[0293] In some embodiments, when the recombinant nucleic acid comprises more than one DRG de-targeting miRNA binding site, the more than one DRG de-targeting miRNA binding site can have the same sequence or a different sequence.

[0294] For example, when the recombinant nucleic acid comprises a first and a second DRG de-targeting miRNA binding site, each of the DRG de-targeting miRNA binding sites can comprise or consist of a nucleic acid sequence that is at least 85%, at least 86%, at least 87%, at least 88%, at least 89%, at least 90%, at least 91%, at least 92%, at least 93%, at least 94%, at least 95%, at least 96%, at least 97%, at least 98%, at least 99%, or 100% identical to the nucleic acid sequence of any one of SEQ ID NOs: 2399-2401.

[0295] Alternatively, the first and the second DRG de-targeting miRNA binding sites can comprise or consist of a nucleic acid sequence that is at least 85%, at least 86%, at least 87%, at least 88%, at least 89%, at least 90%, at least 91%, at least 92%, at least 93%, at least 94%, at least 95%, at least 96%, at least 97%, at least 98%, at least 99%, or 100% identical to the nucleic acid sequence of SEQ ID NO: 2399 and SEQ ID NO: 2400, respectively, or vice versa; the first and the second DRG de-targeting miRNA binding sites can comprise or consist of a nucleic acid sequence that is at least 85%, at least 86%, at least 87%, at least 88%, at least 89%, at least 90%, at least 91%, at least 92%, at least 93%, at least 94%, at least 95%, at least 96%, at least 97%, at least 98%, at least 99%, or 100% identical to the nucleic acid sequence of SEQ ID NO: 2399 and SEQ ID NO: 2401, respectively, or vice versa; or the first and the second DRG de-targeting miRNA binding sites can comprise or consist of a nucleic acid sequence that is at least 85%, at least 86%, at least 87%, at least 88%, at least 89%, at least 90%, at least 91%, at least 92%, at least 93%, at least 94%, at least 95%, at least 96%, at least 97%, at least 98%, at least 99%, or 100% identical to the nucleic acid sequence of SEQ ID NO: 2400 and SEQ ID NO: 2401, respectively, or vice versa.

[0296] The at least one DRG de-targeting miRNA binding site can be positioned in the recombinant nucleic acids described herein at any location suitable for binding a DRG de-targeting miRNA. For example, the DRG de-targeting miRNA binding site can be positioned upstream or downstream of the sequence encoding microdystrophin. In another example, when the recombinant nucleic acid comprises more than one DRG de-targeting miRNA binding site, each of the DRG de-targeting miRNA binding sites can be positioned upstream or downstream of the sequence encoding microdystrophin. Alternatively, one or more of the DRG de-targeting miRNA binding sites can be positioned upstream of the sequence encoding microdystrophin and one or more of the DRG de-targeting miRNA binding sites can be positioned downstream of the sequence encoding microdystrophin.

[0297] Recombinant nucleic acids described herein can further comprise an intron to increase overall efficiency and output of gene expression. Preferably, the intron is positioned between the promoter and transgene (e.g., microdystrophin transgene) in a 5′ to 3′ orientation. Non-limiting examples of introns include a simian virus 40 (SV40) intron sequence, a minute virus of mice (MVM) intron, a RK intron, a β-globin intron, and/or a chicken β-actin (CBA) intron, including functional variants or fragments thereof.

[0298] In some embodiments, the intron is a SV40 intron, including functional variants or fragments thereof. In some embodiments, the SV40 intron comprises or consists of a nucleic acid sequence that is at least 85%, at least 86%, at least 87%, at least 88%, at least 89%, at least 90%, at least 91%, at least 92%, at least 93%, at least 94%, at least 95%, at least 96%, at least 97%, at least 98%, or at least 99% identical to the nucleic acid sequence of SEQ ID NO: 2409. In some embodiments, the SV40 intron comprises or consists of a nucleic acid sequence comprising at least one, two, or three, but no more than four, modifications, e.g., substitutions, relative to the nucleic acid sequence of SEQ ID NO: 2409. In some embodiments, the SV40 intron comprises or consists of the nucleic acid sequence of SEQ ID NO: 2409.

[0299] Recombinant nucleic acids described herein can further comprise a polyadenylation (PolyA) signal sequence or functional fragment thereof, e.g., a fragment capable of measurably increasing expression as compared to expression in its absence. Non-limiting examples of PolyA signal sequences include a bovine growth hormone polyadenylation (bgh-PolyA) signal, a synthetic PolyA signal, and an SV40 Poly A signal.

[0300] In some embodiments, the Poly A signal comprises a bgh-PolyA signal, and the bgh-PolyA signal comprises or consists of a nucleic acid sequence that is at least 85%, at least 86%, at least 87%, at least 88%, at least 89%, at least 90%, at least 91%, at least 92%, at least 93%, at least 94%, at least 95%, at least 96%, at least 97%, at least 98%, or at least 99% identical to the nucleic acid sequence of SEQ ID NO: 2410. In some embodiments, the PolyA signal comprises a bgh-PolyA signal, and the bgh-PolyA signal comprises or consists of the nucleic acid sequence of SEQ ID NO: 2410.

[0301] Recombinant nucleic acids described herein can comprise one or more Poly A signal sequences or functional fragments thereof. In some embodiments, the recombinant nucleic acid described herein comprises a poly A sequence between the 3′ end of a sequence encoding the microdystrophin transgene and the 5′ end of the 3′ ITR.

[0302] Recombinant nucleic acids described herein can comprise one or more ITRs, e.g., two ITRs, with one upstream and the other downstream of a sequence encoding microdystrophin and/or the other elements discussed above (e.g., a promoter, at least one DRG de-targeting miRNA binding site).

[0303] An ITR sequence may be wild type, or it may comprise one or more mutations, e.g., by the insertion, deletion, or substitution of nucleotides, as long as the sequences retain one or more function of a wild type ITR, such as providing for functional rescue, replication and packaging. In some embodiments, a recombinant nucleic acid as described herein can comprise two ITR sequences, each of which is wild type, variant, or modified ITR sequences. In some embodiments, a recombinant nucleic acid as described herein can comprise two ITR sequences, which are different (e.g., one wild type ITR sequence and one variant or modified ITR sequence). For example, the “left” or 5′ ITR is a modified ITR sequence that allows for production of self-complementary genomes, and the “right” or 3′ ITR is a wild type ITR sequence. In some embodiments, the “right” or 3′ ITR is a modified ITR sequence that allows for the production of self-complementary genomes, and the “left” or 5′ ITR is a wild type ITR sequence.

[0304] In some embodiments, a recombinant nucleic acid can comprise ITR sequences from any AAV serotype suitable for replication and packaging of the virus. Non-limiting examples AAV serotypes include AAV1, AAV2, AAV3, AAV4, AAV5, AAV6, AAV6.2, AAV7, AAV8, AAV9, AAV10, AAV11, AAV12, AAV13, AAVrh, AAVrh10, AAVrh74, AAV-DJ, AAV-DJ/8, Anc80, AAV7m8, or any derivative, hybrid or chimeric serotype thereof.

[0305] In some embodiments, the recombinant nucleic acid comprises one or more ITRs derived from AAV2. The nucleotides in an ITR sequence may be in a forward or reverse orientation. In some embodiments, the ITR sequences are both wild type, variant, or modified AAV2 ITR sequences. In some embodiments, the ITR sequences are different (e.g., one ITR is a wild type AAV2 sequence and one ITR is variant or modified AAV2 ITR sequence). In some embodiments, the “left” or 5′ ITR is a modified AAV2 ITR sequence that allows for production of self-complementary genomes, and the “right” or 3′ ITR is a wild type AAV2 ITR sequence. In some embodiments, the “right” or 3′ ITR is a modified AAV2 ITR sequence that allows for the production of self-complementary genomes, and the “left” or 5′ ITR is a wild type AAV2 ITR sequence. In some embodiments, the 5′ ITR is an AAV2 5′ ITR as described in McCarty, D. M., et al., Gene Ther (2001), which is incorporated by reference in its entirety. In some embodiments, the 3′ ITR is an AAV2 3′ ITR as described in Rolling, F. & Samulski, R. J. Molecular biotechnology (1995), which is incorporated by reference in its entirety. In some embodiments, the 3′ ITR may comprise a deletion of the terminal resolution site (dTR), which inhibits Rep protein nicking of the single stranded viral genome. The presence of the dTR in the 3′ ITR increases self-complementary binding of the viral genome to itself, which it may do because of its small size that allows for a double-stranded viral genome to be packaged within a viral capsid.

[0306] In some embodiments, the recombinant nucleic acid comprises a 5′ ITR comprising or consisting of a nucleic acid sequence that is at least 85%, at least 86%, at least 87%, at least 88%, at least 89%, at least 90%, at least 91%, at least 92%, at least 93%, at least 94%, at least 95%, at least 96%, at least 97%, at least 98%, or at least 99% identical to the nucleic acid sequence of SEQ ID NO: 2408. In some embodiments, the recombinant nucleic acid comprises a 5′ ITR comprising or consisting of the nucleic acid sequence of SEQ ID NO: 2408.

[0307] In some embodiments, the recombinant nucleic acid comprises a 3′ ITR comprising or consisting of a nucleic acid sequence that is at least 85%, at least 86%, at least 87%, at least 88%, at least 89%, at least 90%, at least 91%, at least 92%, at least 93%, at least 94%, at least 95%, at least 96%, at least 97%, at least 98%, or at least 99% identical to the nucleic acid sequence of SEQ ID NO: 2411. In some embodiments, the recombinant nucleic acid comprises a 3′ ITR comprising or consisting of the nucleic acid sequence of SEQ ID NO: 2411.

### Example Recombinant Nucleic Acids

[0308] Non-limiting examples of recombinant nucleic acids for use in methods described herein are provided below. In some examples, the recombinant nucleic acid comprises, optionally from 5′ to 3′, a muscle specific promoter; a sequence encoding microdystrophin; and at least one DRG de-targeting miRNA binding site.

[0309] For example, the recombinant nucleic acid comprises, optionally from 5′ to 3′, a muscle specific promoter comprising or consisting of a nucleic acid sequence that is at least 85%, at least 86%, at least 87%, at least 88%, at least 89%, at least 90%, at least 91%, at least 92%, at least 93%, at least 94%, at least 95%, at least 96%, at least 97%, at least 98%, or at least 99% identical to the nucleic acid sequence of any one of SEQ ID NOs: 2402-2404; a sequence encoding microdystrophin comprising or consisting of a nucleic acid sequence that is at least 85%, at least 86%, at least 87%, at least 88%, at least 89%, at least 90%, at least 91%, at least 92%, at least 93%, at least 94%, at least 95%, at least 96%, at least 97%, at least 98%, or at least 99% identical to the nucleic acid sequence of any one of SEQ ID NOs: 2405-2407; and at least one DRG de-targeting miRNA binding site comprising or consisting of a nucleic acid sequence that is at least 85%, at least 86%, at least 87%, at least 88%, at least 89%, at least 90%, at least 91%, at least 92%, at least 93%, at least 94%, at least 95%, at least 96%, at least 97%, at least 98%, or at least 99% identical to the nucleic acid sequence of any one of SEQ ID NOs: 2399-2401.

[0310] In another example, the recombinant nucleic acid comprises a promoter comprising or consisting of a nucleic acid sequence that is at least 85%, at least 86%, at least 87%, at least 88%, at least 89%, at least 90%, at least 91%, at least 92%, at least 93%, at least 94%, at least 95%, at least 96%, at least 97%, at least 98%, or at least 99% identical to the nucleic acid sequence of SEQ ID NO: 2402; a sequence encoding microdystrophin comprising or consisting of a nucleic acid sequence that is at least 85%, at least 86%, at least 87%, at least 88%, at least 89%, at least 90%, at least 91%, at least 92%, at least 93%, at least 94%, at least 95%, at least 96%, at least 97%, at least 98%, or at least 99% identical to the nucleic acid sequence of SEQ ID NO: 2405; and at least one DRG de-targeting miRNA binding site comprising or consisting of a nucleic acid sequence that is at least 85%, at least 86%, at least 87%, at least 88%, at least 89%, at least 90%, at least 91%, at least 92%, at least 93%, at least 94%, at least 95%, at least 96%, at least 97%, at least 98%, or at least 99% identical to the nucleic acid sequence of SEQ ID NO: 2399.

[0311] In another example, the recombinant nucleic acid comprises a promoter comprising or consisting of a nucleic acid sequence that is at least 85%, at least 86%, at least 87%, at least 88%, at least 89%, at least 90%, at least 91%, at least 92%, at least 93%, at least 94%, at least 95%, at least 96%, at least 97%, at least 98%, or at least 99% identical to the nucleic acid sequence of SEQ ID NO: 2403; a sequence encoding microdystrophin comprising or consisting of a nucleic acid sequence that is at least 85%, at least 86%, at least 87%, at least 88%, at least 89%, at least 90%, at least 91%, at least 92%, at least 93%, at least 94%, at least 95%, at least 96%, at least 97%, at least 98%, or at least 99% identical to the nucleic acid sequence of SEQ ID NO: 2405; and at least one DRG de-targeting miRNA binding site comprising or consisting of a nucleic acid sequence that is at least 85%, at least 86%, at least 87%, at least 88%, at least 89%, at least 90%, at least 91%, at least 92%, at least 93%, at least 94%, at least 95%, at least 96%, at least 97%, at least 98%, or at least 99% identical to the nucleic acid sequence of SEQ ID NO: 2399.

[0312] In another example, the recombinant nucleic acid comprises a promoter comprising or consisting of a nucleic acid sequence that is at least 85%, at least 86%, at least 87%, at least 88%, at least 89%, at least 90%, at least 91%, at least 92%, at least 93%, at least 94%, at least 95%, at least 96%, at least 97%, at least 98%, or at least 99% identical to the nucleic acid sequence of SEQ ID NO: 2404; a sequence encoding microdystrophin comprising or consisting of a nucleic acid sequence that is at least 85%, at least 86%, at least 87%, at least 88%, at least 89%, at least 90%, at least 91%, at least 92%, at least 93%, at least 94%, at least 95%, at least 96%, at least 97%, at least 98%, or at least 99% identical to the nucleic acid sequence of SEQ ID NO: 2405; and at least one DRG de-targeting miRNA binding site comprising or consisting of a nucleic acid sequence that is at least 85%, at least 86%, at least 87%, at least 88%, at least 89%, at least 90%, at least 91%, at least 92%, at least 93%, at least 94%, at least 95%, at least 96%, at least 97%, at least 98%, or at least 99% identical to the nucleic acid sequence of SEQ ID NO: 2399.

[0313] In another example, the recombinant nucleic acid comprises a promoter comprising or consisting of a nucleic acid sequence that is at least 85%, at least 86%, at least 87%, at least 88%, at least 89%, at least 90%, at least 91%, at least 92%, at least 93%, at least 94%, at least 95%, at least 96%, at least 97%, at least 98%, or at least 99% identical to the nucleic acid sequence of SEQ ID NO: 2402; a sequence encoding microdystrophin comprising or consisting of a nucleic acid sequence that is at least 85%, at least 86%, at least 87%, at least 88%, at least 89%, at least 90%, at least 91%, at least 92%, at least 93%, at least 94%, at least 95%, at least 96%, at least 97%, at least 98%, or at least 99% identical to the nucleic acid sequence of SEQ ID NO: 2405; and at least one DRG de-targeting miRNA binding site comprising or consisting of a nucleic acid sequence that is at least 85%, at least 86%, at least 87%, at least 88%, at least 89%, at least 90%, at least 91%, at least 92%, at least 93%, at least 94%, at least 95%, at least 96%, at least 97%, at least 98%, or at least 99% identical to the nucleic acid sequence of SEQ ID NO: 2400.

[0314] In another example, the recombinant nucleic acid comprises a promoter comprising or consisting of a nucleic acid sequence that is at least 85%, at least 86%, at least 87%, at least 88%, at least 89%, at least 90%, at least 91%, at least 92%, at least 93%, at least 94%, at least 95%, at least 96%, at least 97%, at least 98%, or at least 99% identical to the nucleic acid sequence of SEQ ID NO: 2403; a sequence encoding microdystrophin comprising or consisting of a nucleic acid sequence that is at least 85%, at least 86%, at least 87%, at least 88%, at least 89%, at least 90%, at least 91%, at least 92%, at least 93%, at least 94%, at least 95%, at least 96%, at least 97%, at least 98%, or at least 99% identical to the nucleic acid sequence of SEQ ID NO: 2405; and at least one DRG de-targeting miRNA binding site comprising or consisting of a nucleic acid sequence that is at least 85%, at least 86%, at least 87%, at least 88%, at least 89%, at least 90%, at least 91%, at least 92%, at least 93%, at least 94%, at least 95%, at least 96%, at least 97%, at least 98%, or at least 99% identical to the nucleic acid sequence of SEQ ID NO: 2400.

[0315] In another example, the recombinant nucleic acid comprises a promoter comprising or consisting of a nucleic acid sequence that is at least 85%, at least 86%, at least 87%, at least 88%, at least 89%, at least 90%, at least 91%, at least 92%, at least 93%, at least 94%, at least 95%, at least 96%, at least 97%, at least 98%, or at least 99% identical to the nucleic acid sequence of SEQ ID NO: 2404; a sequence encoding microdystrophin comprising or consisting of a nucleic acid sequence that is at least 85%, at least 86%, at least 87%, at least 88%, at least 89%, at least 90%, at least 91%, at least 92%, at least 93%, at least 94%, at least 95%, at least 96%, at least 97%, at least 98%, or at least 99% identical to the nucleic acid sequence of SEQ ID NO: 2405; and at least one DRG de-targeting miRNA binding site comprising or consisting of a nucleic acid sequence that is at least 85%, at least 86%, at least 87%, at least 88%, at least 89%, at least 90%, at least 91%, at least 92%, at least 93%, at least 94%, at least 95%, at least 96%, at least 97%, at least 98%, or at least 99% identical to the nucleic acid sequence of SEQ ID NO: 2400.

[0316] In another example, the recombinant nucleic acid comprises a promoter comprising or consisting of a nucleic acid sequence that is at least 85%, at least 86%, at least 87%, at least 88%, at least 89%, at least 90%, at least 91%, at least 92%, at least 93%, at least 94%, at least 95%, at least 96%, at least 97%, at least 98%, or at least 99% identical to the nucleic acid sequence of SEQ ID NO: 2402; a sequence encoding microdystrophin comprising or consisting of a nucleic acid sequence that is at least 85%, at least 86%, at least 87%, at least 88%, at least 89%, at least 90%, at least 91%, at least 92%, at least 93%, at least 94%, at least 95%, at least 96%, at least 97%, at least 98%, or at least 99% identical to the nucleic acid sequence of SEQ ID NO: 2405; and at least one DRG de-targeting miRNA binding site comprising or consisting of a nucleic acid sequence that is at least 85%, at least 86%, at least 87%, at least 88%, at least 89%, at least 90%, at least 91%, at least 92%, at least 93%, at least 94%, at least 95%, at least 96%, at least 97%, at least 98%, or at least 99% identical to the nucleic acid sequence of SEQ ID NO: 2401.

[0317] In another example, the recombinant nucleic acid comprises a promoter comprising or consisting of a nucleic acid sequence that is at least 85%, at least 86%, at least 87%, at least 88%, at least 89%, at least 90%, at least 91%, at least 92%, at least 93%, at least 94%, at least 95%, at least 96%, at least 97%, at least 98%, or at least 99% identical to the nucleic acid sequence of SEQ ID NO: 2403; a sequence encoding microdystrophin comprising or consisting of a nucleic acid sequence that is at least 85%, at least 86%, at least 87%, at least 88%, at least 89%, at least 90%, at least 91%, at least 92%, at least 93%, at least 94%, at least 95%, at least 96%, at least 97%, at least 98%, or at least 99% identical to the nucleic acid sequence of SEQ ID NO: 2405; and at least one DRG de-targeting miRNA binding site comprising or consisting of a nucleic acid sequence that is at least 85%, at least 86%, at least 87%, at least 88%, at least 89%, at least 90%, at least 91%, at least 92%, at least 93%, at least 94%, at least 95%, at least 96%, at least 97%, at least 98%, or at least 99% identical to the nucleic acid sequence of SEQ ID NO: 2401.

[0318] In another example, the recombinant nucleic acid comprises a promoter comprising or consisting of a nucleic acid sequence that is at least 85%, at least 86%, at least 87%, at least 88%, at least 89%, at least 90%, at least 91%, at least 92%, at least 93%, at least 94%, at least 95%, at least 96%, at least 97%, at least 98%, or at least 99% identical to the nucleic acid sequence of SEQ ID NO: 2404; a sequence encoding microdystrophin comprising or consisting of a nucleic acid sequence that is at least 85%, at least 86%, at least 87%, at least 88%, at least 89%, at least 90%, at least 91%, at least 92%, at least 93%, at least 94%, at least 95%, at least 96%, at least 97%, at least 98%, or at least 99% identical to the nucleic acid sequence of SEQ ID NO: 2405; and at least one DRG de-targeting miRNA binding site comprising or consisting of a nucleic acid sequence that is at least 85%, at least 86%, at least 87%, at least 88%, at least 89%, at least 90%, at least 91%, at least 92%, at least 93%, at least 94%, at least 95%, at least 96%, at least 97%, at least 98%, or at least 99% identical to the nucleic acid sequence of SEQ ID NO: 2401.

[0319] In another example, the recombinant nucleic acid comprises a promoter comprising or consisting of a nucleic acid sequence that is at least 85%, at least 86%, at least 87%, at least 88%, at least 89%, at least 90%, at least 91%, at least 92%, at least 93%, at least 94%, at least 95%, at least 96%, at least 97%, at least 98%, or at least 99% identical to the nucleic acid sequence of SEQ ID NO: 2402; a sequence encoding microdystrophin comprising or consisting of a nucleic acid sequence that is at least 85%, at least 86%, at least 87%, at least 88%, at least 89%, at least 90%, at least 91%, at least 92%, at least 93%, at least 94%, at least 95%, at least 96%, at least 97%, at least 98%, or at least 99% identical to the nucleic acid sequence of SEQ ID NO: 2406; and at least one DRG de-targeting miRNA binding site comprising or consisting of a nucleic acid sequence that is at least 85%, at least 86%, at least 87%, at least 88%, at least 89%, at least 90%, at least 91%, at least 92%, at least 93%, at least 94%, at least 95%, at least 96%, at least 97%, at least 98%, or at least 99% identical to the nucleic acid sequence of SEQ ID NO: 2399.

[0320] In another example, the recombinant nucleic acid comprises a promoter comprising or consisting of a nucleic acid sequence that is at least 85%, at least 86%, at least 87%, at least 88%, at least 89%, at least 90%, at least 91%, at least 92%, at least 93%, at least 94%, at least 95%, at least 96%, at least 97%, at least 98%, or at least 99% identical to the nucleic acid sequence of SEQ ID NO: 2403; a sequence encoding microdystrophin comprising or consisting of a nucleic acid sequence that is at least 85%, at least 86%, at least 87%, at least 88%, at least 89%, at least 90%, at least 91%, at least 92%, at least 93%, at least 94%, at least 95%, at least 96%, at least 97%, at least 98%, or at least 99% identical to the nucleic acid sequence of SEQ ID NO: 2406; and at least one DRG de-targeting miRNA binding site comprising or consisting of a nucleic acid sequence that is at least 85%, at least 86%, at least 87%, at least 88%, at least 89%, at least 90%, at least 91%, at least 92%, at least 93%, at least 94%, at least 95%, at least 96%, at least 97%, at least 98%, or at least 99% identical to the nucleic acid sequence of SEQ ID NO: 2399.

[0321] In another example, the recombinant nucleic acid comprises a promoter comprising or consisting of a nucleic acid sequence that is at least 85%, at least 86%, at least 87%, at least 88%, at least 89%, at least 90%, at least 91%, at least 92%, at least 93%, at least 94%, at least 95%, at least 96%, at least 97%, at least 98%, or at least 99% identical to the nucleic acid sequence of SEQ ID NO: 2404; a sequence encoding microdystrophin comprising or consisting of a nucleic acid sequence that is at least 85%, at least 86%, at least 87%, at least 88%, at least 89%, at least 90%, at least 91%, at least 92%, at least 93%, at least 94%, at least 95%, at least 96%, at least 97%, at least 98%, or at least 99% identical to the nucleic acid sequence of SEQ ID NO: 2406; and at least one DRG de-targeting miRNA binding site comprising or consisting of a nucleic acid sequence that is at least 85%, at least 86%, at least 87%, at least 88%, at least 89%, at least 90%, at least 91%, at least 92%, at least 93%, at least 94%, at least 95%, at least 96%, at least 97%, at least 98%, or at least 99% identical to the nucleic acid sequence of SEQ ID NO: 2399.

[0322] In another example, the recombinant nucleic acid comprises a promoter comprising or consisting of a nucleic acid sequence that is at least 85%, at least 86%, at least 87%, at least 88%, at least 89%, at least 90%, at least 91%, at least 92%, at least 93%, at least 94%, at least 95%, at least 96%, at least 97%, at least 98%, or at least 99% identical to the nucleic acid sequence of SEQ ID NO: 2402; a sequence encoding microdystrophin comprising or consisting of a nucleic acid sequence that is at least 85%, at least 86%, at least 87%, at least 88%, at least 89%, at least 90%, at least 91%, at least 92%, at least 93%, at least 94%, at least 95%, at least 96%, at least 97%, at least 98%, or at least 99% identical to the nucleic acid sequence of SEQ ID NO: 2406; and at least one DRG de-targeting miRNA binding site comprising or consisting of a nucleic acid sequence that is at least 85%, at least 86%, at least 87%, at least 88%, at least 89%, at least 90%, at least 91%, at least 92%, at least 93%, at least 94%, at least 95%, at least 96%, at least 97%, at least 98%, or at least 99% identical to the nucleic acid sequence of SEQ ID NO: 2400.

[0323] In another example, the recombinant nucleic acid comprises a promoter comprising or consisting of a nucleic acid sequence that is at least 85%, at least 86%, at least 87%, at least 88%, at least 89%, at least 90%, at least 91%, at least 92%, at least 93%, at least 94%, at least 95%, at least 96%, at least 97%, at least 98%, or at least 99% identical to the nucleic acid sequence of SEQ ID NO: 2403; a sequence encoding microdystrophin comprising or consisting of a nucleic acid sequence that is at least 85%, at least 86%, at least 87%, at least 88%, at least 89%, at least 90%, at least 91%, at least 92%, at least 93%, at least 94%, at least 95%, at least 96%, at least 97%, at least 98%, or at least 99% identical to the nucleic acid sequence of SEQ ID NO: 2406; and at least one DRG de-targeting miRNA binding site comprising or consisting of a nucleic acid sequence that is at least 85%, at least 86%, at least 87%, at least 88%, at least 89%, at least 90%, at least 91%, at least 92%, at least 93%, at least 94%, at least 95%, at least 96%, at least 97%, at least 98%, or at least 99% identical to the nucleic acid sequence of SEQ ID NO: 2400.

[0324] In another example, the recombinant nucleic acid comprises a promoter comprising or consisting of a nucleic acid sequence that is at least 85%, at least 86%, at least 87%, at least 88%, at least 89%, at least 90%, at least 91%, at least 92%, at least 93%, at least 94%, at least 95%, at least 96%, at least 97%, at least 98%, or at least 99% identical to the nucleic acid sequence of SEQ ID NO: 2404; a sequence encoding microdystrophin comprising or consisting of a nucleic acid sequence that is at least 85%, at least 86%, at least 87%, at least 88%, at least 89%, at least 90%, at least 91%, at least 92%, at least 93%, at least 94%, at least 95%, at least 96%, at least 97%, at least 98%, or at least 99% identical to the nucleic acid sequence of SEQ ID NO: 2406; and at least one DRG de-targeting miRNA binding site comprising or consisting of a nucleic acid sequence that is at least 85%, at least 86%, at least 87%, at least 88%, at least 89%, at least 90%, at least 91%, at least 92%, at least 93%, at least 94%, at least 95%, at least 96%, at least 97%, at least 98%, or at least 99% identical to the nucleic acid sequence of SEQ ID NO: 2400.

[0325] In another example, the recombinant nucleic acid comprises a promoter comprising or consisting of a nucleic acid sequence that is at least 85%, at least 86%, at least 87%, at least 88%, at least 89%, at least 90%, at least 91%, at least 92%, at least 93%, at least 94%, at least 95%, at least 96%, at least 97%, at least 98%, or at least 99% identical to the nucleic acid sequence of SEQ ID NO: 2402; a sequence encoding microdystrophin comprising or consisting of a nucleic acid sequence that is at least 85%, at least 86%, at least 87%, at least 88%, at least 89%, at least 90%, at least 91%, at least 92%, at least 93%, at least 94%, at least 95%, at least 96%, at least 97%, at least 98%, or at least 99% identical to the nucleic acid sequence of SEQ ID NO: 2406; and at least one DRG de-targeting miRNA binding site comprising or consisting of a nucleic acid sequence that is at least 85%, at least 86%, at least 87%, at least 88%, at least 89%, at least 90%, at least 91%, at least 92%, at least 93%, at least 94%, at least 95%, at least 96%, at least 97%, at least 98%, or at least 99% identical to the nucleic acid sequence of SEQ ID NO: 2401.

[0326] In another example, the recombinant nucleic acid comprises a promoter comprising or consisting of a nucleic acid sequence that is at least 85%, at least 86%, at least 87%, at least 88%, at least 89%, at least 90%, at least 91%, at least 92%, at least 93%, at least 94%, at least 95%, at least 96%, at least 97%, at least 98%, or at least 99% identical to the nucleic acid sequence of SEQ ID NO: 2403; a sequence encoding microdystrophin comprising or consisting of a nucleic acid sequence that is at least 85%, at least 86%, at least 87%, at least 88%, at least 89%, at least 90%, at least 91%, at least 92%, at least 93%, at least 94%, at least 95%, at least 96%, at least 97%, at least 98%, or at least 99% identical to the nucleic acid sequence of SEQ ID NO: 2406; and at least one DRG de-targeting miRNA binding site comprising or consisting of a nucleic acid sequence that is at least 85%, at least 86%, at least 87%, at least 88%, at least 89%, at least 90%, at least 91%, at least 92%, at least 93%, at least 94%, at least 95%, at least 96%, at least 97%, at least 98%, or at least 99% identical to the nucleic acid sequence of SEQ ID NO: 2401.

[0327] In another example, the recombinant nucleic acid comprises a promoter comprising or consisting of a nucleic acid sequence that is at least 85%, at least 86%, at least 87%, at least 88%, at least 89%, at least 90%, at least 91%, at least 92%, at least 93%, at least 94%, at least 95%, at least 96%, at least 97%, at least 98%, or at least 99% identical to the nucleic acid sequence of SEQ ID NO: 2404; a sequence encoding microdystrophin comprising or consisting of a nucleic acid sequence that is at least 85%, at least 86%, at least 87%, at least 88%, at least 89%, at least 90%, at least 91%, at least 92%, at least 93%, at least 94%, at least 95%, at least 96%, at least 97%, at least 98%, or at least 99% identical to the nucleic acid sequence of SEQ ID NO: 2406; and at least one DRG de-targeting miRNA binding site comprising or consisting of a nucleic acid sequence that is at least 85%, at least 86%, at least 87%, at least 88%, at least 89%, at least 90%, at least 91%, at least 92%, at least 93%, at least 94%, at least 95%, at least 96%, at least 97%, at least 98%, or at least 99% identical to the nucleic acid sequence of SEQ ID NO: 2401.

[0328] In another example, the recombinant nucleic acid comprises a promoter comprising or consisting of a nucleic acid sequence that is at least 85%, at least 86%, at least 87%, at least 88%, at least 89%, at least 90%, at least 91%, at least 92%, at least 93%, at least 94%, at least 95%, at least 96%, at least 97%, at least 98%, or at least 99% identical to the nucleic acid sequence of SEQ ID NO: 2402; a sequence encoding microdystrophin comprising or consisting of a nucleic acid sequence that is at least 85%, at least 86%, at least 87%, at least 88%, at least 89%, at least 90%, at least 91%, at least 92%, at least 93%, at least 94%, at least 95%, at least 96%, at least 97%, at least 98%, or at least 99% identical to the nucleic acid sequence of SEQ ID NO: 2407; and at least one DRG de-targeting miRNA binding site comprising or consisting of a nucleic acid sequence that is at least 85%, at least 86%, at least 87%, at least 88%, at least 89%, at least 90%, at least 91%, at least 92%, at least 93%, at least 94%, at least 95%, at least 96%, at least 97%, at least 98%, or at least 99% identical to the nucleic acid sequence of SEQ ID NO: 2399.

[0329] In another example, the recombinant nucleic acid comprises a promoter comprising or consisting of a nucleic acid sequence that is at least 85%, at least 86%, at least 87%, at least 88%, at least 89%, at least 90%, at least 91%, at least 92%, at least 93%, at least 94%, at least 95%, at least 96%, at least 97%, at least 98%, or at least 99% identical to the nucleic acid sequence of SEQ ID NO: 2403; a sequence encoding microdystrophin comprising or consisting of a nucleic acid sequence that is at least 85%, at least 86%, at least 87%, at least 88%, at least 89%, at least 90%, at least 91%, at least 92%, at least 93%, at least 94%, at least 95%, at least 96%, at least 97%, at least 98%, or at least 99% identical to the nucleic acid sequence of SEQ ID NO: 2407; and at least one DRG de-targeting miRNA binding site comprising or consisting of a nucleic acid sequence that is at least 85%, at least 86%, at least 87%, at least 88%, at least 89%, at least 90%, at least 91%, at least 92%, at least 93%, at least 94%, at least 95%, at least 96%, at least 97%, at least 98%, or at least 99% identical to the nucleic acid sequence of SEQ ID NO: 2399.

[0330] In another example, the recombinant nucleic acid comprises a promoter comprising or consisting of a nucleic acid sequence that is at least 85%, at least 86%, at least 87%, at least 88%, at least 89%, at least 90%, at least 91%, at least 92%, at least 93%, at least 94%, at least 95%, at least 96%, at least 97%, at least 98%, or at least 99% identical to the nucleic acid sequence of SEQ ID NO: 2404; a sequence encoding microdystrophin comprising or consisting of a nucleic acid sequence that is at least 85%, at least 86%, at least 87%, at least 88%, at least 89%, at least 90%, at least 91%, at least 92%, at least 93%, at least 94%, at least 95%, at least 96%, at least 97%, at least 98%, or at least 99% identical to the nucleic acid sequence of SEQ ID NO: 2407; and at least one DRG de-targeting miRNA binding site comprising or consisting of a nucleic acid sequence that is at least 85%, at least 86%, at least 87%, at least 88%, at least 89%, at least 90%, at least 91%, at least 92%, at least 93%, at least 94%, at least 95%, at least 96%, at least 97%, at least 98%, or at least 99% identical to the nucleic acid sequence of SEQ ID NO: 2399.

[0331] In another example, the recombinant nucleic acid comprises a promoter comprising or consisting of a nucleic acid sequence that is at least 85%, at least 86%, at least 87%, at least 88%, at least 89%, at least 90%, at least 91%, at least 92%, at least 93%, at least 94%, at least 95%, at least 96%, at least 97%, at least 98%, or at least 99% identical to the nucleic acid sequence of SEQ ID NO: 2402; a sequence encoding microdystrophin comprising or consisting of a nucleic acid sequence that is at least 85%, at least 86%, at least 87%, at least 88%, at least 89%, at least 90%, at least 91%, at least 92%, at least 93%, at least 94%, at least 95%, at least 96%, at least 97%, at least 98%, or at least 99% identical to the nucleic acid sequence of SEQ ID NO: 2407; and at least one DRG de-targeting miRNA binding site comprising or consisting of a nucleic acid sequence that is at least 85%, at least 86%, at least 87%, at least 88%, at least 89%, at least 90%, at least 91%, at least 92%, at least 93%, at least 94%, at least 95%, at least 96%, at least 97%, at least 98%, or at least 99% identical to the nucleic acid sequence of SEQ ID NO: 2400.

[0332] In another example, the recombinant nucleic acid comprises a promoter comprising or consisting of a nucleic acid sequence that is at least 85%, at least 86%, at least 87%, at least 88%, at least 89%, at least 90%, at least 91%, at least 92%, at least 93%, at least 94%, at least 95%, at least 96%, at least 97%, at least 98%, or at least 99% identical to the nucleic acid sequence of SEQ ID NO: 2403; a sequence encoding microdystrophin comprising or consisting of a nucleic acid sequence that is at least 85%, at least 86%, at least 87%, at least 88%, at least 89%, at least 90%, at least 91%, at least 92%, at least 93%, at least 94%, at least 95%, at least 96%, at least 97%, at least 98%, or at least 99% identical to the nucleic acid sequence of SEQ ID NO: 2407; and at least one DRG de-targeting miRNA binding site comprising or consisting of a nucleic acid sequence that is at least 85%, at least 86%, at least 87%, at least 88%, at least 89%, at least 90%, at least 91%, at least 92%, at least 93%, at least 94%, at least 95%, at least 96%, at least 97%, at least 98%, or at least 99% identical to the nucleic acid sequence of SEQ ID NO: 2400.

[0333] In another example, the recombinant nucleic acid comprises a promoter comprising or consisting of a nucleic acid sequence that is at least 85%, at least 86%, at least 87%, at least 88%, at least 89%, at least 90%, at least 91%, at least 92%, at least 93%, at least 94%, at least 95%, at least 96%, at least 97%, at least 98%, or at least 99% identical to the nucleic acid sequence of SEQ ID NO: 2404; a sequence encoding microdystrophin comprising or consisting of a nucleic acid sequence that is at least 85%, at least 86%, at least 87%, at least 88%, at least 89%, at least 90%, at least 91%, at least 92%, at least 93%, at least 94%, at least 95%, at least 96%, at least 97%, at least 98%, or at least 99% identical to the nucleic acid sequence of SEQ ID NO: 2407; and at least one DRG de-targeting miRNA binding site comprising or consisting of a nucleic acid sequence that is at least 85%, at least 86%, at least 87%, at least 88%, at least 89%, at least 90%, at least 91%, at least 92%, at least 93%, at least 94%, at least 95%, at least 96%, at least 97%, at least 98%, or at least 99% identical to the nucleic acid sequence of SEQ ID NO: 2400.

[0334] In another example, the recombinant nucleic acid comprises a promoter comprising or consisting of a nucleic acid sequence that is at least 85%, at least 86%, at least 87%, at least 88%, at least 89%, at least 90%, at least 91%, at least 92%, at least 93%, at least 94%, at least 95%, at least 96%, at least 97%, at least 98%, or at least 99% identical to the nucleic acid sequence of SEQ ID NO: 2402; a sequence encoding microdystrophin comprising or consisting of a nucleic acid sequence that is at least 85%, at least 86%, at least 87%, at least 88%, at least 89%, at least 90%, at least 91%, at least 92%, at least 93%, at least 94%, at least 95%, at least 96%, at least 97%, at least 98%, or at least 99% identical to the nucleic acid sequence of SEQ ID NO: 2407; and at least one DRG de-targeting miRNA binding site comprising or consisting of a nucleic acid sequence that is at least 85%, at least 86%, at least 87%, at least 88%, at least 89%, at least 90%, at least 91%, at least 92%, at least 93%, at least 94%, at least 95%, at least 96%, at least 97%, at least 98%, or at least 99% identical to the nucleic acid sequence of SEQ ID NO: 2401.

[0335] In another example, the recombinant nucleic acid comprises a promoter comprising or consisting of a nucleic acid sequence that is at least 85%, at least 86%, at least 87%, at least 88%, at least 89%, at least 90%, at least 91%, at least 92%, at least 93%, at least 94%, at least 95%, at least 96%, at least 97%, at least 98%, or at least 99% identical to the nucleic acid sequence of SEQ ID NO: 2403; a sequence encoding microdystrophin comprising or consisting of a nucleic acid sequence that is at least 85%, at least 86%, at least 87%, at least 88%, at least 89%, at least 90%, at least 91%, at least 92%, at least 93%, at least 94%, at least 95%, at least 96%, at least 97%, at least 98%, or at least 99% identical to the nucleic acid sequence of SEQ ID NO: 2407; and at least one DRG de-targeting miRNA binding site comprising or consisting of a nucleic acid sequence that is at least 85%, at least 86%, at least 87%, at least 88%, at least 89%, at least 90%, at least 91%, at least 92%, at least 93%, at least 94%, at least 95%, at least 96%, at least 97%, at least 98%, or at least 99% identical to the nucleic acid sequence of SEQ ID NO: 2401.

[0336] In another example, the recombinant nucleic acid comprises a promoter comprising or consisting of a nucleic acid sequence that is at least 85%, at least 86%, at least 87%, at least 88%, at least 89%, at least 90%, at least 91%, at least 92%, at least 93%, at least 94%, at least 95%, at least 96%, at least 97%, at least 98%, or at least 99% identical to the nucleic acid sequence of SEQ ID NO: 2404; a sequence encoding microdystrophin comprising or consisting of a nucleic acid sequence that is at least 85%, at least 86%, at least 87%, at least 88%, at least 89%, at least 90%, at least 91%, at least 92%, at least 93%, at least 94%, at least 95%, at least 96%, at least 97%, at least 98%, or at least 99% identical to the nucleic acid sequence of SEQ ID NO: 2407; and at least one DRG de-targeting miRNA binding site comprising or consisting of a nucleic acid sequence that is at least 85%, at least 86%, at least 87%, at least 88%, at least 89%, at least 90%, at least 91%, at least 92%, at least 93%, at least 94%, at least 95%, at least 96%, at least 97%, at least 98%, or at least 99% identical to the nucleic acid sequence of SEQ ID NO: 2401.

[0337] In some examples, the recombinant nucleic acid comprises a promoter comprising or consisting of the nucleic acid sequence of SEQ ID NO: 2402; a sequence encoding microdystrophin comprising or consisting of the nucleic acid sequence of SEQ ID NO: 2405; and at least one DRG de-targeting miRNA binding site comprising or consisting of the nucleic acid sequence of SEQ ID NO: 2399.

[0338] In another example, the recombinant nucleic acid comprises a promoter comprising or consisting of the nucleic acid sequence of SEQ ID NO: 2403; a sequence encoding microdystrophin comprising or consisting of the nucleic acid sequence of SEQ ID NO: 2405; and at least one DRG de-targeting miRNA binding site comprising or consisting of the nucleic acid sequence of SEQ ID NO: 2399.

[0339] In another example, the recombinant nucleic acid comprises a promoter comprising or consisting of the nucleic acid sequence of SEQ ID NO: 2404; a sequence encoding microdystrophin comprising or consisting of the nucleic acid sequence of SEQ ID NO: 2405; and at least one DRG de-targeting miRNA binding site comprising or consisting of the nucleic acid sequence of SEQ ID NO: 2399.

[0340] In another example, the recombinant nucleic acid comprises a promoter comprising or consisting of the nucleic acid sequence of SEQ ID NO: 2402; a sequence encoding microdystrophin comprising or consisting of the nucleic acid sequence of SEQ ID NO: 2405; and at least one DRG de-targeting miRNA binding site comprising or consisting of the nucleic acid sequence of SEQ ID NO: 2400.

[0341] In another example, the recombinant nucleic acid comprises a promoter comprising or consisting of the nucleic acid sequence of SEQ ID NO: 2403; a sequence encoding microdystrophin comprising or consisting of the nucleic acid sequence of SEQ ID NO: 2405; and at least one DRG de-targeting miRNA binding site comprising or consisting of the nucleic acid sequence of SEQ ID NO: 2400.

[0342] In another example, the recombinant nucleic acid comprises a promoter comprising or consisting of the nucleic acid sequence of SEQ ID NO: 2404; a sequence encoding microdystrophin comprising or consisting of the nucleic acid sequence of SEQ ID NO: 2405; and at least one DRG de-targeting miRNA binding site comprising or consisting of the nucleic acid sequence of SEQ ID NO: 2400.

[0343] In another example, the recombinant nucleic acid comprises a promoter comprising or consisting of the nucleic acid sequence of SEQ ID NO: 2402; a sequence encoding microdystrophin comprising or consisting of the nucleic acid sequence of SEQ ID NO: 2405; and at least one DRG de-targeting miRNA binding site comprising or consisting of the nucleic acid sequence of SEQ ID NO: 2401.

[0344] In another example, the recombinant nucleic acid comprises a promoter comprising or consisting of the nucleic acid sequence of SEQ ID NO: 2403; a sequence encoding microdystrophin comprising or consisting of the nucleic acid sequence of SEQ ID NO: 2405; and at least one DRG de-targeting miRNA binding site comprising or consisting of the nucleic acid sequence of SEQ ID NO: 2401.

[0345] In another example, the recombinant nucleic acid comprises a promoter comprising or consisting of the nucleic acid sequence of SEQ ID NO: 2404; a sequence encoding microdystrophin comprising or consisting of the nucleic acid sequence of SEQ ID NO: 2405;

[0346] and at least one DRG de-targeting miRNA binding site comprising or consisting of the nucleic acid sequence of SEQ ID NO: 2401.

[0347] In another example, the recombinant nucleic acid comprises a promoter comprising or consisting of the nucleic acid sequence of SEQ ID NO: 2402; a sequence encoding microdystrophin comprising or consisting of the nucleic acid sequence of SEQ ID NO: 2406; and at least one DRG de-targeting miRNA binding site comprising or consisting of the nucleic acid sequence of SEQ ID NO: 2399.

[0348] In another example, the recombinant nucleic acid comprises a promoter comprising or consisting of the nucleic acid sequence of SEQ ID NO: 2403; a sequence encoding microdystrophin comprising or consisting of the nucleic acid sequence of SEQ ID NO: 2406; and at least one DRG de-targeting miRNA binding site comprising or consisting of the nucleic acid sequence of SEQ ID NO: 2399.

[0349] In another example, the recombinant nucleic acid comprises a promoter comprising or consisting of the nucleic acid sequence of SEQ ID NO: 2404; a sequence encoding microdystrophin comprising or consisting of the nucleic acid sequence of SEQ ID NO: 2406; and at least one DRG de-targeting miRNA binding site comprising or consisting of the nucleic acid sequence of SEQ ID NO: 2399.

[0350] In another example, the recombinant nucleic acid comprises a promoter comprising or consisting of the nucleic acid sequence of SEQ ID NO: 2402; a sequence encoding microdystrophin comprising or consisting of the nucleic acid sequence of SEQ ID NO: 2406; and at least one DRG de-targeting miRNA binding site comprising or consisting of the nucleic acid sequence of SEQ ID NO: 2400.

[0351] In another example, the recombinant nucleic acid comprises a promoter comprising or consisting of the nucleic acid sequence of SEQ ID NO: 2403; a sequence encoding microdystrophin comprising or consisting of the nucleic acid sequence of SEQ ID NO: 2406; and at least one DRG de-targeting miRNA binding site comprising or consisting of the nucleic acid sequence of SEQ ID NO: 2400.

[0352] In another example, the recombinant nucleic acid comprises a promoter comprising or consisting of the nucleic acid sequence of SEQ ID NO: 2404; a sequence encoding microdystrophin comprising or consisting of the nucleic acid sequence of SEQ ID NO: 2406; and at least one DRG de-targeting miRNA binding site comprising or consisting of the nucleic acid sequence of SEQ ID NO: 2400.

[0353] In another example, the recombinant nucleic acid comprises a promoter comprising or consisting of the nucleic acid sequence of SEQ ID NO: 2402; a sequence encoding microdystrophin comprising or consisting of the nucleic acid sequence of SEQ ID NO: 2406; and at least one DRG de-targeting miRNA binding site comprising or consisting of the nucleic acid sequence of SEQ ID NO: 2401.

[0354] In another example, the recombinant nucleic acid comprises a promoter comprising or consisting of the nucleic acid sequence of SEQ ID NO: 2403; a sequence encoding microdystrophin comprising or consisting of the nucleic acid sequence of SEQ ID NO: 2406; and at least one DRG de-targeting miRNA binding site comprising or consisting of the nucleic acid sequence of SEQ ID NO: 2401.

[0355] In another example, the recombinant nucleic acid comprises a promoter comprising or consisting of the nucleic acid sequence of SEQ ID NO: 2404; a sequence encoding microdystrophin comprising or consisting of the nucleic acid sequence of SEQ ID NO: 2406; and at least one DRG de-targeting miRNA binding site comprising or consisting of the nucleic acid sequence of SEQ ID NO: 2401.

[0356] In another example, the recombinant nucleic acid comprises a promoter comprising or consisting of the nucleic acid sequence of SEQ ID NO: 2402; a sequence encoding microdystrophin comprising or consisting of the nucleic acid sequence of SEQ ID NO: 2407; and at least one DRG de-targeting miRNA binding site comprising or consisting of the nucleic acid sequence of SEQ ID NO: 2399.

[0357] In another example, the recombinant nucleic acid comprises a promoter comprising or consisting of the nucleic acid sequence of SEQ ID NO: 2403; a sequence encoding microdystrophin comprising or consisting of the nucleic acid sequence of SEQ ID NO: 2407; and at least one DRG de-targeting miRNA binding site comprising or consisting of the nucleic acid sequence of SEQ ID NO: 2399.

[0358] In another example, the recombinant nucleic acid comprises a promoter comprising or consisting of the nucleic acid sequence of SEQ ID NO: 2404; a sequence encoding microdystrophin comprising or consisting of the nucleic acid sequence of SEQ ID NO: 2407; and at least one DRG de-targeting miRNA binding site comprising or consisting of the nucleic acid sequence of SEQ ID NO: 2399.

[0359] In another example, the recombinant nucleic acid comprises a promoter comprising or consisting of the nucleic acid sequence of SEQ ID NO: 2402; a sequence encoding microdystrophin comprising or consisting of the nucleic acid sequence of SEQ ID NO: 2407; and at least one DRG de-targeting miRNA binding site comprising or consisting of the nucleic acid sequence of SEQ ID NO: 2400.

[0360] In another example, the recombinant nucleic acid comprises a promoter comprising or consisting of the nucleic acid sequence of SEQ ID NO: 2403; a sequence encoding microdystrophin comprising or consisting of the nucleic acid sequence of SEQ ID NO: 2407; and at least one DRG de-targeting miRNA binding site comprising or consisting of the nucleic acid sequence of SEQ ID NO: 2400.

[0361] In another example, the recombinant nucleic acid comprises a promoter comprising or consisting of the nucleic acid sequence of SEQ ID NO: 2404; a sequence encoding microdystrophin comprising or consisting of the nucleic acid sequence of SEQ ID NO: 2407; and at least one DRG de-targeting miRNA binding site comprising or consisting of the nucleic acid sequence of SEQ ID NO: 2400.

[0362] In another example, the recombinant nucleic acid comprises a promoter comprising or consisting of the nucleic acid sequence of SEQ ID NO: 2402; a sequence encoding microdystrophin comprising or consisting of the nucleic acid sequence of SEQ ID NO: 2407; and at least one DRG de-targeting miRNA binding site comprising or consisting of the nucleic acid sequence of SEQ ID NO: 2401.

[0363] In another example, the recombinant nucleic acid comprises a promoter comprising or consisting of the nucleic acid sequence of SEQ ID NO: 2403; a sequence encoding microdystrophin comprising or consisting of the nucleic acid sequence of SEQ ID NO: 2407; and at least one DRG de-targeting miRNA binding site comprising or consisting of the nucleic acid sequence of SEQ ID NO: 2401.

[0364] In another example, the recombinant nucleic acid comprises a promoter comprising or consisting of the nucleic acid sequence of SEQ ID NO: 2404; a sequence encoding microdystrophin comprising or consisting of the nucleic acid sequence of SEQ ID NO: 2407; and at least one DRG de-targeting miRNA binding site comprising or consisting of the nucleic acid sequence of SEQ ID NO: 2401.

[0365] In some examples, the recombinant nucleic acid comprises, optionally from 5′ to 3′, a 5′ ITR; a muscle specific promoter; an intron; a sequence encoding microdystrophin; a first DRG de-targeting miRNA binding site; a second DRG de-targeting miRNA binding site; a Poly A signal; and a 3′ ITR.

[0366] For example, the recombinant nucleic acid comprises a 5′ITR comprising or consisting of a nucleic acid sequence that is at least 85%, at least 86%, at least 87%, at least 88%, at least 89%, at least 90%, at least 91%, at least 92%, at least 93%, at least 94%, at least 95%, at least 96%, at least 97%, at least 98%, or at least 99% identical to the nucleic acid sequence of SEQ ID NO: 2408; a promoter comprising or consisting of a nucleic acid sequence that is at least 85%, at least 86%, at least 87%, at least 88%, at least 89%, at least 90%, at least 91%, at least 92%, at least 93%, at least 94%, at least 95%, at least 96%, at least 97%, at least 98%, or at least 99% identical to the nucleic acid sequence of any one of SEQ ID NOs: 2402-2404; an intron comprising or consisting of a nucleic acid sequence that is at least 85%, at least 86%, at least 87%, at least 88%, at least 89%, at least 90%, at least 91%, at least 92%, at least 93%, at least 94%, at least 95%, at least 96%, at least 97%, at least 98%, or at least 99% identical to the nucleic acid sequence of SEQ ID NO: 2409; a sequence encoding microdystrophin comprising or consisting of a nucleic acid sequence that is at least 85%, at least 86%, at least 87%, at least 88%, at least 89%, at least 90%, at least 91%, at least 92%, at least 93%, at least 94%, at least 95%, at least 96%, at least 97%, at least 98%, or at least 99% identical to the nucleic acid sequence of any one of SEQ ID NOs: 2405-2407; a first DRG de-targeting miRNA binding site comprising or consisting of a nucleic acid sequence that is at least 85%, at least 86%, at least 87%, at least 88%, at least 89%, at least 90%, at least 91%, at least 92%, at least 93%, at least 94%, at least 95%, at least 96%, at least 97%, at least 98%, or at least 99% identical to the nucleic acid sequence of any one of SEQ ID NOs: 2399-2401; a second DRG de-targeting miRNA binding site comprising or consisting of a nucleic acid sequence that is at least 85%, at least 86%, at least 87%, at least 88%, at least 89%, at least 90%, at least 91%, at least 92%, at least 93%, at least 94%, at least 95%, at least 96%, at least 97%, at least 98%, or at least 99% identical to the nucleic acid sequence of any one of SEQ ID NOs: 2399-2401; a PolyA signal comprising or consisting of a nucleic acid sequence that is at least 85%, at least 86%, at least 87%, at least 88%, at least 89%, at least 90%, at least 91%, at least 92%, at least 93%, at least 94%, at least 95%, at least 96%, at least 97%, at least 98%, or at least 99% identical to the nucleic acid sequence of SEQ ID NO: 2410; and a 3′ ITR comprising or consisting of a nucleic acid sequence that is at least 85%, at least 86%, at least 87%, at least 88%, at least 89%, at least 90%, at least 91%, at least 92%, at least 93%, at least 94%, at least 95%, at least 96%, at least 97%, at least 98%, or at least 99% identical to the nucleic acid sequence of SEQ ID NO: 2411.

[0367] In another example, the recombinant nucleic acid comprises a 5′ ITR comprising or consisting of a nucleic acid sequence that is at least 85%, at least 86%, at least 87%, at least 88%, at least 89%, at least 90%, at least 91%, at least 92%, at least 93%, at least 94%, at least 95%, at least 96%, at least 97%, at least 98%, or at least 99% identical to the nucleic acid sequence of SEQ ID NO: 2408; a promoter comprising or consisting of a nucleic acid sequence that is at least 85%, at least 86%, at least 87%, at least 88%, at least 89%, at least 90%, at least 91%, at least 92%, at least 93%, at least 94%, at least 95%, at least 96%, at least 97%, at least 98%, or at least 99% identical to the nucleic acid sequence of SEQ ID NO: 2402; an intron comprising or consisting of a nucleic acid sequence that is at least 85%, at least 86%, at least 87%, at least 88%, at least 89%, at least 90%, at least 91%, at least 92%, at least 93%, at least 94%, at least 95%, at least 96%, at least 97%, at least 98%, or at least 99% identical to the nucleic acid sequence of SEQ ID NO: 2409; a sequence encoding microdystrophin comprising or consisting of a nucleic acid sequence that is at least 85%, at least 86%, at least 87%, at least 88%, at least 89%, at least 90%, at least 91%, at least 92%, at least 93%, at least 94%, at least 95%, at least 96%, at least 97%, at least 98%, or at least 99% identical to the nucleic acid sequence of SEQ ID NO: 2405; a first DRG de-targeting miRNA binding site comprising or consisting of a nucleic acid sequence that is at least 85%, at least 86%, at least 87%, at least 88%, at least 89%, at least 90%, at least 91%, at least 92%, at least 93%, at least 94%, at least 95%, at least 96%, at least 97%, at least 98%, or at least 99% identical to the nucleic acid sequence of SEQ ID NO: 2399; a second DRG de-targeting miRNA binding site comprising or consisting of a nucleic acid sequence that is at least 85%, at least 86%, at least 87%, at least 88%, at least 89%, at least 90%, at least 91%, at least 92%, at least 93%, at least 94%, at least 95%, at least 96%, at least 97%, at least 98%, or at least 99% identical to the nucleic acid sequence of SEQ ID NO: 2399; a PolyA signal comprising or consisting of a nucleic acid sequence that is at least 85%, at least 86%, at least 87%, at least 88%, at least 89%, at least 90%, at least 91%, at least 92%, at least 93%, at least 94%, at least 95%, at least 96%, at least 97%, at least 98%, or at least 99% identical to the nucleic acid sequence of SEQ ID NO: 2410; and a 3′ ITR comprising or consisting of a nucleic acid sequence that is at least 85%, at least 86%, at least 87%, at least 88%, at least 89%, at least 90%, at least 91%, at least 92%, at least 93%, at least 94%, at least 95%, at least 96%, at least 97%, at least 98%, or at least 99% identical to the nucleic acid sequence of SEQ ID NO: 2411.

[0368] In another example, the recombinant nucleic acid comprises a 5′ITR comprising or consisting of a nucleic acid sequence that is at least 85%, at least 86%, at least 87%, at least 88%, at least 89%, at least 90%, at least 91%, at least 92%, at least 93%, at least 94%, at least 95%, at least 96%, at least 97%, at least 98%, or at least 99% identical to the nucleic acid sequence of SEQ ID NO: 2408; a promoter comprising or consisting of a nucleic acid sequence that is at least 85%, at least 86%, at least 87%, at least 88%, at least 89%, at least 90%, at least 91%, at least 92%, at least 93%, at least 94%, at least 95%, at least 96%, at least 97%, at least 98%, or at least 99% identical to the nucleic acid sequence of SEQ ID NO: 2403; an intron comprising or consisting of a nucleic acid sequence that is at least 85%, at least 86%, at least 87%, at least 88%, at least 89%, at least 90%, at least 91%, at least 92%, at least 93%, at least 94%, at least 95%, at least 96%, at least 97%, at least 98%, or at least 99% identical to the nucleic acid sequence of SEQ ID NO: 2409; a sequence encoding microdystrophin comprising or consisting of a nucleic acid sequence that is at least 85%, at least 86%, at least 87%, at least 88%, at least 89%, at least 90%, at least 91%, at least 92%, at least 93%, at least 94%, at least 95%, at least 96%, at least 97%, at least 98%, or at least 99% identical to the nucleic acid sequence of SEQ ID NO: 2405; a first DRG de-targeting miRNA binding site comprising or consisting of a nucleic acid sequence that is at least 85%, at least 86%, at least 87%, at least 88%, at least 89%, at least 90%, at least 91%, at least 92%, at least 93%, at least 94%, at least 95%, at least 96%, at least 97%, at least 98%, or at least 99% identical to the nucleic acid sequence of SEQ ID NO: 2399; a second DRG de-targeting miRNA binding site comprising or consisting of a nucleic acid sequence that is at least 85%, at least 86%, at least 87%, at least 88%, at least 89%, at least 90%, at least 91%, at least 92%, at least 93%, at least 94%, at least 95%, at least 96%, at least 97%, at least 98%, or at least 99% identical to the nucleic acid sequence of SEQ ID NO: 2399; a PolyA signal comprising or consisting of a nucleic acid sequence that is at least 85%, at least 86%, at least 87%, at least 88%, at least 89%, at least 90%, at least 91%, at least 92%, at least 93%, at least 94%, at least 95%, at least 96%, at least 97%, at least 98%, or at least 99% identical to the nucleic acid sequence of SEQ ID NO: 2410; and a 3′ ITR comprising or consisting of a nucleic acid sequence that is at least 85%, at least 86%, at least 87%, at least 88%, at least 89%, at least 90%, at least 91%, at least 92%, at least 93%, at least 94%, at least 95%, at least 96%, at least 97%, at least 98%, or at least 99% identical to the nucleic acid sequence of SEQ ID NO: 2411.

[0369] In another example, the recombinant nucleic acid comprises a 5′ ITR comprising or consisting of a nucleic acid sequence that is at least 85%, at least 86%, at least 87%, at least 88%, at least 89%, at least 90%, at least 91%, at least 92%, at least 93%, at least 94%, at least 95%, at least 96%, at least 97%, at least 98%, or at least 99% identical to the nucleic acid sequence of SEQ ID NO: 2408; a promoter comprising or consisting of a nucleic acid sequence that is at least 85%, at least 86%, at least 87%, at least 88%, at least 89%, at least 90%, at least 91%, at least 92%, at least 93%, at least 94%, at least 95%, at least 96%, at least 97%, at least 98%, or at least 99% identical to the nucleic acid sequence of SEQ ID NO: 2404; an intron comprising or consisting of a nucleic acid sequence that is at least 85%, at least 86%, at least 87%, at least 88%, at least 89%, at least 90%, at least 91%, at least 92%, at least 93%, at least 94%, at least 95%, at least 96%, at least 97%, at least 98%, or at least 99% identical to the nucleic acid sequence of SEQ ID NO: 2409; a sequence encoding microdystrophin comprising or consisting of a nucleic acid sequence that is at least 85%, at least 86%, at least 87%, at least 88%, at least 89%, at least 90%, at least 91%, at least 92%, at least 93%, at least 94%, at least 95%, at least 96%, at least 97%, at least 98%, or at least 99% identical to the nucleic acid sequence of SEQ ID NO: 2405; a first DRG de-targeting miRNA binding site comprising or consisting of a nucleic acid sequence that is at least 85%, at least 86%, at least 87%, at least 88%, at least 89%, at least 90%, at least 91%, at least 92%, at least 93%, at least 94%, at least 95%, at least 96%, at least 97%, at least 98%, or at least 99% identical to the nucleic acid sequence of SEQ ID NO: 2399; a second DRG de-targeting miRNA binding site comprising or consisting of a nucleic acid sequence that is at least 85%, at least 86%, at least 87%, at least 88%, at least 89%, at least 90%, at least 91%, at least 92%, at least 93%, at least 94%, at least 95%, at least 96%, at least 97%, at least 98%, or at least 99% identical to the nucleic acid sequence of SEQ ID NO: 2399; a PolyA signal comprising or consisting of a nucleic acid sequence that is at least 85%, at least 86%, at least 87%, at least 88%, at least 89%, at least 90%, at least 91%, at least 92%, at least 93%, at least 94%, at least 95%, at least 96%, at least 97%, at least 98%, or at least 99% identical to the nucleic acid sequence of SEQ ID NO: 2410; and a 3′ ITR comprising or consisting of a nucleic acid sequence that is at least 85%, at least 86%, at least 87%, at least 88%, at least 89%, at least 90%, at least 91%, at least 92%, at least 93%, at least 94%, at least 95%, at least 96%, at least 97%, at least 98%, or at least 99% identical to the nucleic acid sequence of SEQ ID NO: 2411.

[0370] In another example, the recombinant nucleic acid comprises a 5′ ITR comprising or consisting of a nucleic acid sequence that is at least 85%, at least 86%, at least 87%, at least 88%, at least 89%, at least 90%, at least 91%, at least 92%, at least 93%, at least 94%, at least 95%, at least 96%, at least 97%, at least 98%, or at least 99% identical to the nucleic acid sequence of SEQ ID NO: 2408; a promoter comprising or consisting of a nucleic acid sequence that is at least 85%, at least 86%, at least 87%, at least 88%, at least 89%, at least 90%, at least 91%, at least 92%, at least 93%, at least 94%, at least 95%, at least 96%, at least 97%, at least 98%, or at least 99% identical to the nucleic acid sequence of SEQ ID NO: 2402; an intron comprises or consists of a nucleic acid sequence that is at least 85%, at least 86%, at least 87%, at least 88%, at least 89%, at least 90%, at least 91%, at least 92%, at least 93%, at least 94%, at least 95%, at least 96%, at least 97%, at least 98%, or at least 99% identical to the nucleic acid sequence of SEQ ID NO: 2409; a sequence encoding microdystrophin comprising or consisting of a nucleic acid sequence that is at least 85%, at least 86%, at least 87%, at least 88%, at least 89%, at least 90%, at least 91%, at least 92%, at least 93%, at least 94%, at least 95%, at least 96%, at least 97%, at least 98%, or at least 99% identical to the nucleic acid sequence of SEQ ID NO: 2405; a first DRG de-targeting miRNA binding site comprising or consisting of a nucleic acid sequence that is at least 85%, at least 86%, at least 87%, at least 88%, at least 89%, at least 90%, at least 91%, at least 92%, at least 93%, at least 94%, at least 95%, at least 96%, at least 97%, at least 98%, or at least 99% identical to the nucleic acid sequence of SEQ ID NO: 2400; a second DRG de-targeting miRNA binding site comprising or consisting of a nucleic acid sequence that is at least 85%, at least 86%, at least 87%, at least 88%, at least 89%, at least 90%, at least 91%, at least 92%, at least 93%, at least 94%, at least 95%, at least 96%, at least 97%, at least 98%, or at least 99% identical to the nucleic acid sequence of SEQ ID NO: 2400; a PolyA signal comprising or consisting of a nucleic acid sequence that is at least 85%, at least 86%, at least 87%, at least 88%, at least 89%, at least 90%, at least 91%, at least 92%, at least 93%, at least 94%, at least 95%, at least 96%, at least 97%, at least 98%, or at least 99% identical to the nucleic acid sequence of SEQ ID NO: 2410; and a 3′ ITR comprising or consisting of a nucleic acid sequence that is at least 85%, at least 86%, at least 87%, at least 88%, at least 89%, at least 90%, at least 91%, at least 92%, at least 93%, at least 94%, at least 95%, at least 96%, at least 97%, at least 98%, or at least 99% identical to the nucleic acid sequence of SEQ ID NO: 2411.

[0371] In another example, the recombinant nucleic acid comprises a 5′ ITR comprising or consisting of a nucleic acid sequence that is at least 85%, at least 86%, at least 87%, at least 88%, at least 89%, at least 90%, at least 91%, at least 92%, at least 93%, at least 94%, at least 95%, at least 96%, at least 97%, at least 98%, or at least 99% identical to the nucleic acid sequence of SEQ ID NO: 2408; a promoter comprising or consisting of a nucleic acid sequence that is at least 85%, at least 86%, at least 87%, at least 88%, at least 89%, at least 90%, at least 91%, at least 92%, at least 93%, at least 94%, at least 95%, at least 96%, at least 97%, at least 98%, or at least 99% identical to the nucleic acid sequence of SEQ ID NO: 2403; an intron comprising or consisting of a nucleic acid sequence that is at least 85%, at least 86%, at least 87%, at least 88%, at least 89%, at least 90%, at least 91%, at least 92%, at least 93%, at least 94%, at least 95%, at least 96%, at least 97%, at least 98%, or at least 99% identical to the nucleic acid sequence of SEQ ID NO: 2409; a sequence encoding microdystrophin comprising or consisting of a nucleic acid sequence that is at least 85%, at least 86%, at least 87%, at least 88%, at least 89%, at least 90%, at least 91%, at least 92%, at least 93%, at least 94%, at least 95%, at least 96%, at least 97%, at least 98%, or at least 99% identical to the nucleic acid sequence of SEQ ID NO: 2405; a first DRG de-targeting miRNA binding site comprising or consisting of a nucleic acid sequence that is at least 85%, at least 86%, at least 87%, at least 88%, at least 89%, at least 90%, at least 91%, at least 92%, at least 93%, at least 94%, at least 95%, at least 96%, at least 97%, at least 98%, or at least 99% identical to the nucleic acid sequence of SEQ ID NO: 2400; a second DRG de-targeting miRNA binding site comprising or consisting of a nucleic acid sequence that is at least 85%, at least 86%, at least 87%, at least 88%, at least 89%, at least 90%, at least 91%, at least 92%, at least 93%, at least 94%, at least 95%, at least 96%, at least 97%, at least 98%, or at least 99% identical to the nucleic acid sequence of SEQ ID NO: 2400; a PolyA signal comprising or consisting of a nucleic acid sequence that is at least 85%, at least 86%, at least 87%, at least 88%, at least 89%, at least 90%, at least 91%, at least 92%, at least 93%, at least 94%, at least 95%, at least 96%, at least 97%, at least 98%, or at least 99% identical to the nucleic acid sequence of SEQ ID NO: 2410; and a 3′ ITR comprising or consisting of a nucleic acid sequence that is at least 85%, at least 86%, at least 87%, at least 88%, at least 89%, at least 90%, at least 91%, at least 92%, at least 93%, at least 94%, at least 95%, at least 96%, at least 97%, at least 98%, or at least 99% identical to the nucleic acid sequence of SEQ ID NO: 2411.

[0372] In another example, the recombinant nucleic acid comprises a 5′ ITR comprising or consisting of a nucleic acid sequence that is at least 85%, at least 86%, at least 87%, at least 88%, at least 89%, at least 90%, at least 91%, at least 92%, at least 93%, at least 94%, at least 95%, at least 96%, at least 97%, at least 98%, or at least 99% identical to the nucleic acid sequence of SEQ ID NO: 2408; a promoter comprising or consisting of a nucleic acid sequence that is at least 85%, at least 86%, at least 87%, at least 88%, at least 89%, at least 90%, at least 91%, at least 92%, at least 93%, at least 94%, at least 95%, at least 96%, at least 97%, at least 98%, or at least 99% identical to the nucleic acid sequence of SEQ ID NO: 2404; an intron comprises or consists of a nucleic acid sequence that is at least 85%, at least 86%, at least 87%, at least 88%, at least 89%, at least 90%, at least 91%, at least 92%, at least 93%, at least 94%, at least 95%, at least 96%, at least 97%, at least 98%, or at least 99% identical to the nucleic acid sequence of SEQ ID NO: 2409; a sequence encoding microdystrophin comprising or consisting of a nucleic acid sequence that is at least 85%, at least 86%, at least 87%, at least 88%, at least 89%, at least 90%, at least 91%, at least 92%, at least 93%, at least 94%, at least 95%, at least 96%, at least 97%, at least 98%, or at least 99% identical to the nucleic acid sequence of SEQ ID NO: 2405; a first DRG de-targeting miRNA binding site comprising or consisting of a nucleic acid sequence that is at least 85%, at least 86%, at least 87%, at least 88%, at least 89%, at least 90%, at least 91%, at least 92%, at least 93%, at least 94%, at least 95%, at least 96%, at least 97%, at least 98%, or at least 99% identical to the nucleic acid sequence of SEQ ID NO: 2400; a second DRG de-targeting miRNA binding site comprising or consisting of a nucleic acid sequence that is at least 85%, at least 86%, at least 87%, at least 88%, at least 89%, at least 90%, at least 91%, at least 92%, at least 93%, at least 94%, at least 95%, at least 96%, at least 97%, at least 98%, or at least 99% identical to the nucleic acid sequence of SEQ ID NO: 2400; a PolyA signal comprising or consisting of a nucleic acid sequence that is at least 85%, at least 86%, at least 87%, at least 88%, at least 89%, at least 90%, at least 91%, at least 92%, at least 93%, at least 94%, at least 95%, at least 96%, at least 97%, at least 98%, or at least 99% identical to the nucleic acid sequence of SEQ ID NO: 2410; and a 3′ ITR comprising or consisting of a nucleic acid sequence that is at least 85%, at least 86%, at least 87%, at least 88%, at least 89%, at least 90%, at least 91%, at least 92%, at least 93%, at least 94%, at least 95%, at least 96%, at least 97%, at least 98%, or at least 99% identical to the nucleic acid sequence of SEQ ID NO: 2411.

[0373] In another example, the recombinant nucleic acid comprises a 5′ ITR comprising or consisting of a nucleic acid sequence that is at least 85%, at least 86%, at least 87%, at least 88%, at least 89%, at least 90%, at least 91%, at least 92%, at least 93%, at least 94%, at least 95%, at least 96%, at least 97%, at least 98%, or at least 99% identical to the nucleic acid sequence of SEQ ID NO: 2408; a promoter comprising or consisting of a nucleic acid sequence that is at least 85%, at least 86%, at least 87%, at least 88%, at least 89%, at least 90%, at least 91%, at least 92%, at least 93%, at least 94%, at least 95%, at least 96%, at least 97%, at least 98%, or at least 99% identical to the nucleic acid sequence of SEQ ID NO: 2402; an intron comprising or consisting of a nucleic acid sequence that is at least 85%, at least 86%, at least 87%, at least 88%, at least 89%, at least 90%, at least 91%, at least 92%, at least 93%, at least 94%, at least 95%, at least 96%, at least 97%, at least 98%, or at least 99% identical to the nucleic acid sequence of SEQ ID NO: 2409; a sequence encoding microdystrophin comprising or consisting of a nucleic acid sequence that is at least 85%, at least 86%, at least 87%, at least 88%, at least 89%, at least 90%, at least 91%, at least 92%, at least 93%, at least 94%, at least 95%, at least 96%, at least 97%, at least 98%, or at least 99% identical to the nucleic acid sequence of SEQ ID NO: 2405; a first DRG de-targeting miRNA binding site comprising or consisting of a nucleic acid sequence that is at least 85%, at least 86%, at least 87%, at least 88%, at least 89%, at least 90%, at least 91%, at least 92%, at least 93%, at least 94%, at least 95%, at least 96%, at least 97%, at least 98%, or at least 99% identical to the nucleic acid sequence of SEQ ID NO: 2401; a second DRG de-targeting miRNA binding site comprising or consisting of a nucleic acid sequence that is at least 85%, at least 86%, at least 87%, at least 88%, at least 89%, at least 90%, at least 91%, at least 92%, at least 93%, at least 94%, at least 95%, at least 96%, at least 97%, at least 98%, or at least 99% identical to the nucleic acid sequence of SEQ ID NO: 2401; a PolyA signal comprising or consisting of a nucleic acid sequence that is at least 85%, at least 86%, at least 87%, at least 88%, at least 89%, at least 90%, at least 91%, at least 92%, at least 93%, at least 94%, at least 95%, at least 96%, at least 97%, at least 98%, or at least 99% identical to the nucleic acid sequence of SEQ ID NO: 2410; and a 3′ ITR comprising or consisting of a nucleic acid sequence that is at least 85%, at least 86%, at least 87%, at least 88%, at least 89%, at least 90%, at least 91%, at least 92%, at least 93%, at least 94%, at least 95%, at least 96%, at least 97%, at least 98%, or at least 99% identical to the nucleic acid sequence of SEQ ID NO: 2411.

[0374] In another example, the recombinant nucleic acid comprises a 5′ ITR comprising or consisting of a nucleic acid sequence that is at least 85%, at least 86%, at least 87%, at least 88%, at least 89%, at least 90%, at least 91%, at least 92%, at least 93%, at least 94%, at least 95%, at least 96%, at least 97%, at least 98%, or at least 99% identical to the nucleic acid sequence of SEQ ID NO: 2408; a promoter comprising or consisting of a nucleic acid sequence that is at least 85%, at least 86%, at least 87%, at least 88%, at least 89%, at least 90%, at least 91%, at least 92%, at least 93%, at least 94%, at least 95%, at least 96%, at least 97%, at least 98%, or at least 99% identical to the nucleic acid sequence of SEQ ID NO: 2403; an intron comprising or consisting of a nucleic acid sequence that is at least 85%, at least 86%, at least 87%, at least 88%, at least 89%, at least 90%, at least 91%, at least 92%, at least 93%, at least 94%, at least 95%, at least 96%, at least 97%, at least 98%, or at least 99% identical to the nucleic acid sequence of SEQ ID NO: 2409; a sequence encoding microdystrophin comprising or consisting of a nucleic acid sequence that is at least 85%, at least 86%, at least 87%, at least 88%, at least 89%, at least 90%, at least 91%, at least 92%, at least 93%, at least 94%, at least 95%, at least 96%, at least 97%, at least 98%, or at least 99% identical to the nucleic acid sequence of SEQ ID NO: 2405; a first DRG de-targeting miRNA binding site comprising or consisting of a nucleic acid sequence that is at least 85%, at least 86%, at least 87%, at least 88%, at least 89%, at least 90%, at least 91%, at least 92%, at least 93%, at least 94%, at least 95%, at least 96%, at least 97%, at least 98%, or at least 99% identical to the nucleic acid sequence of SEQ ID NO: 2401; a second DRG de-targeting miRNA binding site comprising or consisting of a nucleic acid sequence that is at least 85%, at least 86%, at least 87%, at least 88%, at least 89%, at least 90%, at least 91%, at least 92%, at least 93%, at least 94%, at least 95%, at least 96%, at least 97%, at least 98%, or at least 99% identical to the nucleic acid sequence of SEQ ID NO: 2401; a PolyA signal comprising or consisting of a nucleic acid sequence that is at least 85%, at least 86%, at least 87%, at least 88%, at least 89%, at least 90%, at least 91%, at least 92%, at least 93%, at least 94%, at least 95%, at least 96%, at least 97%, at least 98%, or at least 99% identical to the nucleic acid sequence of SEQ ID NO: 2410; and a 3′ ITR comprising or consisting of a nucleic acid sequence that is at least 85%, at least 86%, at least 87%, at least 88%, at least 89%, at least 90%, at least 91%, at least 92%, at least 93%, at least 94%, at least 95%, at least 96%, at least 97%, at least 98%, or at least 99% identical to the nucleic acid sequence of SEQ ID NO: 2411.

[0375] In another example, the recombinant nucleic acid comprises a 5′ ITR comprising or consisting of a nucleic acid sequence that is at least 85%, at least 86%, at least 87%, at least 88%, at least 89%, at least 90%, at least 91%, at least 92%, at least 93%, at least 94%, at least 95%, at least 96%, at least 97%, at least 98%, or at least 99% identical to the nucleic acid sequence of SEQ ID NO: 2408; a promoter comprising or consisting of a nucleic acid sequence that is at least 85%, at least 86%, at least 87%, at least 88%, at least 89%, at least 90%, at least 91%, at least 92%, at least 93%, at least 94%, at least 95%, at least 96%, at least 97%, at least 98%, or at least 99% identical to the nucleic acid sequence of SEQ ID NO: 2404; an intron comprises or consists of a nucleic acid sequence that is at least 85%, at least 86%, at least 87%, at least 88%, at least 89%, at least 90%, at least 91%, at least 92%, at least 93%, at least 94%, at least 95%, at least 96%, at least 97%, at least 98%, or at least 99% identical to the nucleic acid sequence of SEQ ID NO: 2409; a sequence encoding microdystrophin comprising or consisting of a nucleic acid sequence that is at least 85%, at least 86%, at least 87%, at least 88%, at least 89%, at least 90%, at least 91%, at least 92%, at least 93%, at least 94%, at least 95%, at least 96%, at least 97%, at least 98%, or at least 99% identical to the nucleic acid sequence of SEQ ID NO: 2405; a first DRG de-targeting miRNA binding site comprising or consisting of a nucleic acid sequence that is at least 85%, at least 86%, at least 87%, at least 88%, at least 89%, at least 90%, at least 91%, at least 92%, at least 93%, at least 94%, at least 95%, at least 96%, at least 97%, at least 98%, or at least 99% identical to the nucleic acid sequence of SEQ ID NO: 2401; a second DRG de-targeting miRNA binding site comprising or consisting of a nucleic acid sequence that is at least 85%, at least 86%, at least 87%, at least 88%, at least 89%, at least 90%, at least 91%, at least 92%, at least 93%, at least 94%, at least 95%, at least 96%, at least 97%, at least 98%, or at least 99% identical to the nucleic acid sequence of SEQ ID NO: 2401; a PolyA signal comprising or consisting of a nucleic acid sequence that is at least 85%, at least 86%, at least 87%, at least 88%, at least 89%, at least 90%, at least 91%, at least 92%, at least 93%, at least 94%, at least 95%, at least 96%, at least 97%, at least 98%, or at least 99% identical to the nucleic acid sequence of SEQ ID NO: 2410; and a 3′ ITR comprising or consisting of a nucleic acid sequence that is at least 85%, at least 86%, at least 87%, at least 88%, at least 89%, at least 90%, at least 91%, at least 92%, at least 93%, at least 94%, at least 95%, at least 96%, at least 97%, at least 98%, or at least 99% identical to the nucleic acid sequence of SEQ ID NO: 2411.

[0376] In another example, the recombinant nucleic acid comprises a 5′ ITR comprising or consisting of a nucleic acid sequence that is at least 85%, at least 86%, at least 87%, at least 88%, at least 89%, at least 90%, at least 91%, at least 92%, at least 93%, at least 94%, at least 95%, at least 96%, at least 97%, at least 98%, or at least 99% identical to the nucleic acid sequence of SEQ ID NO: 2408; a promoter comprising or consisting of a nucleic acid sequence that is at least 85%, at least 86%, at least 87%, at least 88%, at least 89%, at least 90%, at least 91%, at least 92%, at least 93%, at least 94%, at least 95%, at least 96%, at least 97%, at least 98%, or at least 99% identical to the nucleic acid sequence of SEQ ID NO: 2402; an intron comprises or consists of a nucleic acid sequence that is at least 85%, at least 86%, at least 87%, at least 88%, at least 89%, at least 90%, at least 91%, at least 92%, at least 93%, at least 94%, at least 95%, at least 96%, at least 97%, at least 98%, or at least 99% identical to the nucleic acid sequence of SEQ ID NO: 2409; a sequence encoding microdystrophin comprising or consisting of a nucleic acid sequence that is at least 85%, at least 86%, at least 87%, at least 88%, at least 89%, at least 90%, at least 91%, at least 92%, at least 93%, at least 94%, at least 95%, at least 96%, at least 97%, at least 98%, or at least 99% identical to the nucleic acid sequence of SEQ ID NO: 2406; a first DRG de-targeting miRNA binding site comprising or consisting of a nucleic acid sequence that is at least 85%, at least 86%, at least 87%, at least 88%, at least 89%, at least 90%, at least 91%, at least 92%, at least 93%, at least 94%, at least 95%, at least 96%, at least 97%, at least 98%, or at least 99% identical to the nucleic acid sequence of SEQ ID NO: 2399; a second DRG de-targeting miRNA binding site comprising or consisting of a nucleic acid sequence that is at least 85%, at least 86%, at least 87%, at least 88%, at least 89%, at least 90%, at least 91%, at least 92%, at least 93%, at least 94%, at least 95%, at least 96%, at least 97%, at least 98%, or at least 99% identical to the nucleic acid sequence of SEQ ID NO: 2399; a PolyA signal comprising or consisting of a nucleic acid sequence that is at least 85%, at least 86%, at least 87%, at least 88%, at least 89%, at least 90%, at least 91%, at least 92%, at least 93%, at least 94%, at least 95%, at least 96%, at least 97%, at least 98%, or at least 99% identical to the nucleic acid sequence of SEQ ID NO: 2410; and a 3′ ITR comprising or consisting of a nucleic acid sequence that is at least 85%, at least 86%, at least 87%, at least 88%, at least 89%, at least 90%, at least 91%, at least 92%, at least 93%, at least 94%, at least 95%, at least 96%, at least 97%, at least 98%, or at least 99% identical to the nucleic acid sequence of SEQ ID NO: 2411.

[0377] In another example, the recombinant nucleic acid comprises a 5′ comprising or consisting of a nucleic acid sequence that is at least 85%, at least 86%, at least 87%, at least 88%, at least 89%, at least 90%, at least 91%, at least 92%, at least 93%, at least 94%, at least 95%, at least 96%, at least 97%, at least 98%, or at least 99% identical to the nucleic acid sequence of SEQ ID NO: 2408; a promoter comprising or consisting of a nucleic acid sequence that is at least 85%, at least 86%, at least 87%, at least 88%, at least 89%, at least 90%, at least 91%, at least 92%, at least 93%, at least 94%, at least 95%, at least 96%, at least 97%, at least 98%, or at least 99% identical to the nucleic acid sequence of SEQ ID NO: 2403; an intron comprising or consisting of a nucleic acid sequence that is at least 85%, at least 86%, at least 87%, at least 88%, at least 89%, at least 90%, at least 91%, at least 92%, at least 93%, at least 94%, at least 95%, at least 96%, at least 97%, at least 98%, or at least 99% identical to the nucleic acid sequence of SEQ ID NO: 2409; a sequence encoding microdystrophin comprising or consisting of a nucleic acid sequence that is at least 85%, at least 86%, at least 87%, at least 88%, at least 89%, at least 90%, at least 91%, at least 92%, at least 93%, at least 94%, at least 95%, at least 96%, at least 97%, at least 98%, or at least 99% identical to the nucleic acid sequence of SEQ ID NO: 2406; a first DRG de-targeting miRNA binding site comprising or consisting of a nucleic acid sequence that is at least 85%, at least 86%, at least 87%, at least 88%, at least 89%, at least 90%, at least 91%, at least 92%, at least 93%, at least 94%, at least 95%, at least 96%, at least 97%, at least 98%, or at least 99% identical to the nucleic acid sequence of SEQ ID NO: 2399; a second DRG de-targeting miRNA binding site comprising or consisting of a nucleic acid sequence that is at least 85%, at least 86%, at least 87%, at least 88%, at least 89%, at least 90%, at least 91%, at least 92%, at least 93%, at least 94%, at least 95%, at least 96%, at least 97%, at least 98%, or at least 99% identical to the nucleic acid sequence of SEQ ID NO: 2399; a PolyA signal comprising or consisting of a nucleic acid sequence that is at least 85%, at least 86%, at least 87%, at least 88%, at least 89%, at least 90%, at least 91%, at least 92%, at least 93%, at least 94%, at least 95%, at least 96%, at least 97%, at least 98%, or at least 99% identical to the nucleic acid sequence of SEQ ID NO: 2410; and a 3′ ITR comprising or consisting of a nucleic acid sequence that is at least 85%, at least 86%, at least 87%, at least 88%, at least 89%, at least 90%, at least 91%, at least 92%, at least 93%, at least 94%, at least 95%, at least 96%, at least 97%, at least 98%, or at least 99% identical to the nucleic acid sequence of SEQ ID NO: 2411.

[0378] In another example, the recombinant nucleic acid comprises a 5′ ITR comprising or consisting of a nucleic acid sequence that is at least 85%, at least 86%, at least 87%, at least 88%, at least 89%, at least 90%, at least 91%, at least 92%, at least 93%, at least 94%, at least 95%, at least 96%, at least 97%, at least 98%, or at least 99% identical to the nucleic acid sequence of SEQ ID NO: 2408; a promoter comprising or consisting of a nucleic acid sequence that is at least 85%, at least 86%, at least 87%, at least 88%, at least 89%, at least 90%, at least 91%, at least 92%, at least 93%, at least 94%, at least 95%, at least 96%, at least 97%, at least 98%, or at least 99% identical to the nucleic acid sequence of SEQ ID NO: 2404; an intron comprising or consisting of a nucleic acid sequence that is at least 85%, at least 86%, at least 87%, at least 88%, at least 89%, at least 90%, at least 91%, at least 92%, at least 93%, at least 94%, at least 95%, at least 96%, at least 97%, at least 98%, or at least 99% identical to the nucleic acid sequence of SEQ ID NO: 2409; a sequence encoding microdystrophin comprising or consisting of a nucleic acid sequence that is at least 85%, at least 86%, at least 87%, at least 88%, at least 89%, at least 90%, at least 91%, at least 92%, at least 93%, at least 94%, at least 95%, at least 96%, at least 97%, at least 98%, or at least 99% identical to the nucleic acid sequence of SEQ ID NO: 2406; a first DRG de-targeting miRNA binding site comprising or consisting of a nucleic acid sequence that is at least 85%, at least 86%, at least 87%, at least 88%, at least 89%, at least 90%, at least 91%, at least 92%, at least 93%, at least 94%, at least 95%, at least 96%, at least 97%, at least 98%, or at least 99% identical to the nucleic acid sequence of SEQ ID NO: 2399; a second DRG de-targeting miRNA binding site comprising or consisting of a nucleic acid sequence that is at least 85%, at least 86%, at least 87%, at least 88%, at least 89%, at least 90%, at least 91%, at least 92%, at least 93%, at least 94%, at least 95%, at least 96%, at least 97%, at least 98%, or at least 99% identical to the nucleic acid sequence of SEQ ID NO: 2399; a PolyA signal comprising or consisting of a nucleic acid sequence that is at least 85%, at least 86%, at least 87%, at least 88%, at least 89%, at least 90%, at least 91%, at least 92%, at least 93%, at least 94%, at least 95%, at least 96%, at least 97%, at least 98%, or at least 99% identical to the nucleic acid sequence of SEQ ID NO: 2410; and a 3′ ITR comprising or consisting of a nucleic acid sequence that is at least 85%, at least 86%, at least 87%, at least 88%, at least 89%, at least 90%, at least 91%, at least 92%, at least 93%, at least 94%, at least 95%, at least 96%, at least 97%, at least 98%, or at least 99% identical to the nucleic acid sequence of SEQ ID NO: 2411.

[0379] In another example, the recombinant nucleic acid comprises a 5′ ITR comprising or consisting of a nucleic acid sequence that is at least 85%, at least 86%, at least 87%, at least 88%, at least 89%, at least 90%, at least 91%, at least 92%, at least 93%, at least 94%, at least 95%, at least 96%, at least 97%, at least 98%, or at least 99% identical to the nucleic acid sequence of SEQ ID NO: 2408; a promoter comprising or consisting of a nucleic acid sequence that is at least 85%, at least 86%, at least 87%, at least 88%, at least 89%, at least 90%, at least 91%, at least 92%, at least 93%, at least 94%, at least 95%, at least 96%, at least 97%, at least 98%, or at least 99% identical to the nucleic acid sequence of SEQ ID NO: 2402; an intron comprising or consisting of a nucleic acid sequence that is at least 85%, at least 86%, at least 87%, at least 88%, at least 89%, at least 90%, at least 91%, at least 92%, at least 93%, at least 94%, at least 95%, at least 96%, at least 97%, at least 98%, or at least 99% identical to the nucleic acid sequence of SEQ ID NO: 2409; a sequence encoding microdystrophin comprising or consisting of a nucleic acid sequence that is at least 85%, at least 86%, at least 87%, at least 88%, at least 89%, at least 90%, at least 91%, at least 92%, at least 93%, at least 94%, at least 95%, at least 96%, at least 97%, at least 98%, or at least 99% identical to the nucleic acid sequence of SEQ ID NO: 2406; a first DRG de-targeting miRNA binding site comprising or consisting of a nucleic acid sequence that is at least 85%, at least 86%, at least 87%, at least 88%, at least 89%, at least 90%, at least 91%, at least 92%, at least 93%, at least 94%, at least 95%, at least 96%, at least 97%, at least 98%, or at least 99% identical to the nucleic acid sequence of SEQ ID NO: 2400; a second DRG de-targeting miRNA binding site comprising or consisting of a nucleic acid sequence that is at least 85%, at least 86%, at least 87%, at least 88%, at least 89%, at least 90%, at least 91%, at least 92%, at least 93%, at least 94%, at least 95%, at least 96%, at least 97%, at least 98%, or at least 99% identical to the nucleic acid sequence of SEQ ID NO: 2400; a PolyA signal comprising or consisting of a nucleic acid sequence that is at least 85%, at least 86%, at least 87%, at least 88%, at least 89%, at least 90%, at least 91%, at least 92%, at least 93%, at least 94%, at least 95%, at least 96%, at least 97%, at least 98%, or at least 99% identical to the nucleic acid sequence of SEQ ID NO: 2410; and a 3′ ITR comprising or consisting of a nucleic acid sequence that is at least 85%, at least 86%, at least 87%, at least 88%, at least 89%, at least 90%, at least 91%, at least 92%, at least 93%, at least 94%, at least 95%, at least 96%, at least 97%, at least 98%, or at least 99% identical to the nucleic acid sequence of SEQ ID NO: 2411.

[0380] In another example, the recombinant nucleic acid comprises a 5′ ITR comprising or consisting of a nucleic acid sequence that is at least 85%, at least 86%, at least 87%, at least 88%, at least 89%, at least 90%, at least 91%, at least 92%, at least 93%, at least 94%, at least 95%, at least 96%, at least 97%, at least 98%, or at least 99% identical to the nucleic acid sequence of SEQ ID NO: 2408; a promoter comprising or consisting of a nucleic acid sequence that is at least 85%, at least 86%, at least 87%, at least 88%, at least 89%, at least 90%, at least 91%, at least 92%, at least 93%, at least 94%, at least 95%, at least 96%, at least 97%, at least 98%, or at least 99% identical to the nucleic acid sequence of SEQ ID NO: 2403; an intron comprising or consisting of a nucleic acid sequence that is at least 85%, at least 86%, at least 87%, at least 88%, at least 89%, at least 90%, at least 91%, at least 92%, at least 93%, at least 94%, at least 95%, at least 96%, at least 97%, at least 98%, or at least 99% identical to the nucleic acid sequence of SEQ ID NO: 2409; a sequence encoding microdystrophin comprising or consisting of a nucleic acid sequence that is at least 85%, at least 86%, at least 87%, at least 88%, at least 89%, at least 90%, at least 91%, at least 92%, at least 93%, at least 94%, at least 95%, at least 96%, at least 97%, at least 98%, or at least 99% identical to the nucleic acid sequence of SEQ ID NO: 2406; a first DRG de-targeting miRNA binding site comprising or consisting of a nucleic acid sequence that is at least 85%, at least 86%, at least 87%, at least 88%, at least 89%, at least 90%, at least 91%, at least 92%, at least 93%, at least 94%, at least 95%, at least 96%, at least 97%, at least 98%, or at least 99% identical to the nucleic acid sequence of SEQ ID NO: 2400; a second DRG de-targeting miRNA binding site comprising or consisting of a nucleic acid sequence that is at least 85%, at least 86%, at least 87%, at least 88%, at least 89%, at least 90%, at least 91%, at least 92%, at least 93%, at least 94%, at least 95%, at least 96%, at least 97%, at least 98%, or at least 99% identical to the nucleic acid sequence of SEQ ID NO: 2400; a PolyA signal comprising or consisting of a nucleic acid sequence that is at least 85%, at least 86%, at least 87%, at least 88%, at least 89%, at least 90%, at least 91%, at least 92%, at least 93%, at least 94%, at least 95%, at least 96%, at least 97%, at least 98%, or at least 99% identical to the nucleic acid sequence of SEQ ID NO: 2410; and a 3′ ITR comprising or consisting of a nucleic acid sequence that is at least 85%, at least 86%, at least 87%, at least 88%, at least 89%, at least 90%, at least 91%, at least 92%, at least 93%, at least 94%, at least 95%, at least 96%, at least 97%, at least 98%, or at least 99% identical to the nucleic acid sequence of SEQ ID NO: 2411.

[0381] In another example, the recombinant nucleic acid comprises a 5′ ITR comprising or consisting of a nucleic acid sequence that is at least 85%, at least 86%, at least 87%, at least 88%, at least 89%, at least 90%, at least 91%, at least 92%, at least 93%, at least 94%, at least 95%, at least 96%, at least 97%, at least 98%, or at least 99% identical to the nucleic acid sequence of SEQ ID NO: 2408; a promoter comprising or consisting of a nucleic acid sequence that is at least 85%, at least 86%, at least 87%, at least 88%, at least 89%, at least 90%, at least 91%, at least 92%, at least 93%, at least 94%, at least 95%, at least 96%, at least 97%, at least 98%, or at least 99% identical to the nucleic acid sequence of SEQ ID NO: 2404; an intron comprising or consisting of a nucleic acid sequence that is at least 85%, at least 86%, at least 87%, at least 88%, at least 89%, at least 90%, at least 91%, at least 92%, at least 93%, at least 94%, at least 95%, at least 96%, at least 97%, at least 98%, or at least 99% identical to the nucleic acid sequence of SEQ ID NO: 2409; a sequence encoding microdystrophin comprising or consisting of a nucleic acid sequence that is at least 85%, at least 86%, at least 87%, at least 88%, at least 89%, at least 90%, at least 91%, at least 92%, at least 93%, at least 94%, at least 95%, at least 96%, at least 97%, at least 98%, or at least 99% identical to the nucleic acid sequence of SEQ ID NO: 2406; a first DRG de-targeting miRNA binding site comprising or consisting of a nucleic acid sequence that is at least 85%, at least 86%, at least 87%, at least 88%, at least 89%, at least 90%, at least 91%, at least 92%, at least 93%, at least 94%, at least 95%, at least 96%, at least 97%, at least 98%, or at least 99% identical to the nucleic acid sequence of SEQ ID NO: 2400; a second DRG de-targeting miRNA binding site comprising or consisting of a nucleic acid sequence that is at least 85%, at least 86%, at least 87%, at least 88%, at least 89%, at least 90%, at least 91%, at least 92%, at least 93%, at least 94%, at least 95%, at least 96%, at least 97%, at least 98%, or at least 99% identical to the nucleic acid sequence of SEQ ID NO: 2400; a PolyA signal comprising or consisting of a nucleic acid sequence that is at least 85%, at least 86%, at least 87%, at least 88%, at least 89%, at least 90%, at least 91%, at least 92%, at least 93%, at least 94%, at least 95%, at least 96%, at least 97%, at least 98%, or at least 99% identical to the nucleic acid sequence of SEQ ID NO: 2410; and a 3′ ITR comprising or consisting of a nucleic acid sequence that is at least 85%, at least 86%, at least 87%, at least 88%, at least 89%, at least 90%, at least 91%, at least 92%, at least 93%, at least 94%, at least 95%, at least 96%, at least 97%, at least 98%, or at least 99% identical to the nucleic acid sequence of SEQ ID NO: 2411.

[0382] In another example, the recombinant nucleic acid comprises a 5′ ITR comprising or consisting of a nucleic acid sequence that is at least 85%, at least 86%, at least 87%, at least 88%, at least 89%, at least 90%, at least 91%, at least 92%, at least 93%, at least 94%, at least 95%, at least 96%, at least 97%, at least 98%, or at least 99% identical to the nucleic acid sequence of SEQ ID NO: 2408; a promoter comprising or consisting of a nucleic acid sequence that is at least 85%, at least 86%, at least 87%, at least 88%, at least 89%, at least 90%, at least 91%, at least 92%, at least 93%, at least 94%, at least 95%, at least 96%, at least 97%, at least 98%, or at least 99% identical to the nucleic acid sequence of SEQ ID NO: 2402; an intron comprising or consisting of a nucleic acid sequence that is at least 85%, at least 86%, at least 87%, at least 88%, at least 89%, at least 90%, at least 91%, at least 92%, at least 93%, at least 94%, at least 95%, at least 96%, at least 97%, at least 98%, or at least 99% identical to the nucleic acid sequence of SEQ ID NO: 2409; a sequence encoding microdystrophin comprising or consisting of a nucleic acid sequence that is at least 85%, at least 86%, at least 87%, at least 88%, at least 89%, at least 90%, at least 91%, at least 92%, at least 93%, at least 94%, at least 95%, at least 96%, at least 97%, at least 98%, or at least 99% identical to the nucleic acid sequence of SEQ ID NO: 2406; a first DRG de-targeting miRNA binding site comprising or consisting of a nucleic acid sequence that is at least 85%, at least 86%, at least 87%, at least 88%, at least 89%, at least 90%, at least 91%, at least 92%, at least 93%, at least 94%, at least 95%, at least 96%, at least 97%, at least 98%, or at least 99% identical to the nucleic acid sequence of SEQ ID NO: 2401; a second DRG de-targeting miRNA binding site comprising or consisting of a nucleic acid sequence that is at least 85%, at least 86%, at least 87%, at least 88%, at least 89%, at least 90%, at least 91%, at least 92%, at least 93%, at least 94%, at least 95%, at least 96%, at least 97%, at least 98%, or at least 99% identical to the nucleic acid sequence of SEQ ID NO: 2401; a PolyA signal comprising or consisting of a nucleic acid sequence that is at least 85%, at least 86%, at least 87%, at least 88%, at least 89%, at least 90%, at least 91%, at least 92%, at least 93%, at least 94%, at least 95%, at least 96%, at least 97%, at least 98%, or at least 99% identical to the nucleic acid sequence of SEQ ID NO: 2410; and a 3′ ITR comprising or consisting of a nucleic acid sequence that is at least 85%, at least 86%, at least 87%, at least 88%, at least 89%, at least 90%, at least 91%, at least 92%, at least 93%, at least 94%, at least 95%, at least 96%, at least 97%, at least 98%, or at least 99% identical to the nucleic acid sequence of SEQ ID NO: 2411.

[0383] In another example, the recombinant nucleic acid comprises a 5′ ITR comprising or consisting of a nucleic acid sequence that is at least 85%, at least 86%, at least 87%, at least 88%, at least 89%, at least 90%, at least 91%, at least 92%, at least 93%, at least 94%, at least 95%, at least 96%, at least 97%, at least 98%, or at least 99% identical to the nucleic acid sequence of SEQ ID NO: 2408; a promoter comprising or consisting of a nucleic acid sequence that is at least 85%, at least 86%, at least 87%, at least 88%, at least 89%, at least 90%, at least 91%, at least 92%, at least 93%, at least 94%, at least 95%, at least 96%, at least 97%, at least 98%, or at least 99% identical to the nucleic acid sequence of SEQ ID NO: 2403; an intron comprising or consisting of a nucleic acid sequence that is at least 85%, at least 86%, at least 87%, at least 88%, at least 89%, at least 90%, at least 91%, at least 92%, at least 93%, at least 94%, at least 95%, at least 96%, at least 97%, at least 98%, or at least 99% identical to the nucleic acid sequence of SEQ ID NO: 2409; a sequence encoding microdystrophin comprising or consisting of a nucleic acid sequence that is at least 85%, at least 86%, at least 87%, at least 88%, at least 89%, at least 90%, at least 91%, at least 92%, at least 93%, at least 94%, at least 95%, at least 96%, at least 97%, at least 98%, or at least 99% identical to the nucleic acid sequence of SEQ ID NO: 2406; a first DRG de-targeting miRNA binding site comprising or consisting of a nucleic acid sequence that is at least 85%, at least 86%, at least 87%, at least 88%, at least 89%, at least 90%, at least 91%, at least 92%, at least 93%, at least 94%, at least 95%, at least 96%, at least 97%, at least 98%, or at least 99% identical to the nucleic acid sequence of SEQ ID NO: 2401; a second DRG de-targeting miRNA binding site comprising or consisting of a nucleic acid sequence that is at least 85%, at least 86%, at least 87%, at least 88%, at least 89%, at least 90%, at least 91%, at least 92%, at least 93%, at least 94%, at least 95%, at least 96%, at least 97%, at least 98%, or at least 99% identical to the nucleic acid sequence of SEQ ID NO: 2401; a PolyA signal comprising or consisting of a nucleic acid sequence that is at least 85%, at least 86%, at least 87%, at least 88%, at least 89%, at least 90%, at least 91%, at least 92%, at least 93%, at least 94%, at least 95%, at least 96%, at least 97%, at least 98%, or at least 99% identical to the nucleic acid sequence of SEQ ID NO: 2410; and a 3′ ITR comprising or consisting of a nucleic acid sequence that is at least 85%, at least 86%, at least 87%, at least 88%, at least 89%, at least 90%, at least 91%, at least 92%, at least 93%, at least 94%, at least 95%, at least 96%, at least 97%, at least 98%, or at least 99% identical to the nucleic acid sequence of SEQ ID NO: 2411.

[0384] In another example, the recombinant nucleic acid comprises a 5′ ITR comprising or consisting of a nucleic acid sequence that is at least 85%, at least 86%, at least 87%, at least 88%, at least 89%, at least 90%, at least 91%, at least 92%, at least 93%, at least 94%, at least 95%, at least 96%, at least 97%, at least 98%, or at least 99% identical to the nucleic acid sequence of SEQ ID NO: 2408; a promoter comprising or consisting of a nucleic acid sequence that is at least 85%, at least 86%, at least 87%, at least 88%, at least 89%, at least 90%, at least 91%, at least 92%, at least 93%, at least 94%, at least 95%, at least 96%, at least 97%, at least 98%, or at least 99% identical to the nucleic acid sequence of SEQ ID NO: 2404; an intron comprising or consisting of a nucleic acid sequence that is at least 85%, at least 86%, at least 87%, at least 88%, at least 89%, at least 90%, at least 91%, at least 92%, at least 93%, at least 94%, at least 95%, at least 96%, at least 97%, at least 98%, or at least 99% identical to the nucleic acid sequence of SEQ ID NO: 2409; a sequence encoding microdystrophin comprising or consisting of a nucleic acid sequence that is at least 85%, at least 86%, at least 87%, at least 88%, at least 89%, at least 90%, at least 91%, at least 92%, at least 93%, at least 94%, at least 95%, at least 96%, at least 97%, at least 98%, or at least 99% identical to the nucleic acid sequence of SEQ ID NO: 2406; a first DRG de-targeting miRNA binding site comprising or consisting of a nucleic acid sequence that is at least 85%, at least 86%, at least 87%, at least 88%, at least 89%, at least 90%, at least 91%, at least 92%, at least 93%, at least 94%, at least 95%, at least 96%, at least 97%, at least 98%, or at least 99% identical to the nucleic acid sequence of SEQ ID NO: 2401; a second DRG de-targeting miRNA binding site comprising or consisting of a nucleic acid sequence that is at least 85%, at least 86%, at least 87%, at least 88%, at least 89%, at least 90%, at least 91%, at least 92%, at least 93%, at least 94%, at least 95%, at least 96%, at least 97%, at least 98%, or at least 99% identical to the nucleic acid sequence of SEQ ID NO: 2401; a PolyA signal comprising or consisting of a nucleic acid sequence that is at least 85%, at least 86%, at least 87%, at least 88%, at least 89%, at least 90%, at least 91%, at least 92%, at least 93%, at least 94%, at least 95%, at least 96%, at least 97%, at least 98%, or at least 99% identical to the nucleic acid sequence of SEQ ID NO: 2410; and a 3′ ITR comprising or consisting of a nucleic acid sequence that is at least 85%, at least 86%, at least 87%, at least 88%, at least 89%, at least 90%, at least 91%, at least 92%, at least 93%, at least 94%, at least 95%, at least 96%, at least 97%, at least 98%, or at least 99% identical to the nucleic acid sequence of SEQ ID NO: 2411.

[0385] In another example, the recombinant nucleic acid comprises a 5′ ITR comprising or consisting of a nucleic acid sequence that is at least 85%, at least 86%, at least 87%, at least 88%, at least 89%, at least 90%, at least 91%, at least 92%, at least 93%, at least 94%, at least 95%, at least 96%, at least 97%, at least 98%, or at least 99% identical to the nucleic acid sequence of SEQ ID NO: 2408; a promoter comprising or consisting of a nucleic acid sequence that is at least 85%, at least 86%, at least 87%, at least 88%, at least 89%, at least 90%, at least 91%, at least 92%, at least 93%, at least 94%, at least 95%, at least 96%, at least 97%, at least 98%, or at least 99% identical to the nucleic acid sequence of SEQ ID NO: 2402; an intron comprising or consisting of a nucleic acid sequence that is at least 85%, at least 86%, at least 87%, at least 88%, at least 89%, at least 90%, at least 91%, at least 92%, at least 93%, at least 94%, at least 95%, at least 96%, at least 97%, at least 98%, or at least 99% identical to the nucleic acid sequence of SEQ ID NO: 2409; a sequence encoding microdystrophin comprising or consisting of a nucleic acid sequence that is at least 85%, at least 86%, at least 87%, at least 88%, at least 89%, at least 90%, at least 91%, at least 92%, at least 93%, at least 94%, at least 95%, at least 96%, at least 97%, at least 98%, or at least 99% identical to the nucleic acid sequence of SEQ ID NO: 2407; a first DRG de-targeting miRNA binding site comprising or consisting of a nucleic acid sequence that is at least 85%, at least 86%, at least 87%, at least 88%, at least 89%, at least 90%, at least 91%, at least 92%, at least 93%, at least 94%, at least 95%, at least 96%, at least 97%, at least 98%, or at least 99% identical to the nucleic acid sequence of SEQ ID NO: 2399; a second DRG de-targeting miRNA binding site comprising or consisting of a nucleic acid sequence that is at least 85%, at least 86%, at least 87%, at least 88%, at least 89%, at least 90%, at least 91%, at least 92%, at least 93%, at least 94%, at least 95%, at least 96%, at least 97%, at least 98%, or at least 99% identical to the nucleic acid sequence of SEQ ID NO: 2399; a PolyA signal comprising or consisting of a nucleic acid sequence that is at least 85%, at least 86%, at least 87%, at least 88%, at least 89%, at least 90%, at least 91%, at least 92%, at least 93%, at least 94%, at least 95%, at least 96%, at least 97%, at least 98%, or at least 99% identical to the nucleic acid sequence of SEQ ID NO: 2410; and a 3′ ITR comprising or consisting of a nucleic acid sequence that is at least 85%, at least 86%, at least 87%, at least 88%, at least 89%, at least 90%, at least 91%, at least 92%, at least 93%, at least 94%, at least 95%, at least 96%, at least 97%, at least 98%, or at least 99% identical to the nucleic acid sequence of SEQ ID NO: 2411.

[0386] In another example, the recombinant nucleic acid comprises a 5′ ITR comprising or consisting of a nucleic acid sequence that is at least 85%, at least 86%, at least 87%, at least 88%, at least 89%, at least 90%, at least 91%, at least 92%, at least 93%, at least 94%, at least 95%, at least 96%, at least 97%, at least 98%, or at least 99% identical to the nucleic acid sequence of SEQ ID NO: 2408; a promoter comprising or consisting of a nucleic acid sequence that is at least 85%, at least 86%, at least 87%, at least 88%, at least 89%, at least 90%, at least 91%, at least 92%, at least 93%, at least 94%, at least 95%, at least 96%, at least 97%, at least 98%, or at least 99% identical to the nucleic acid sequence of SEQ ID NO: 2403; an intron comprising or consisting of a nucleic acid sequence that is at least 85%, at least 86%, at least 87%, at least 88%, at least 89%, at least 90%, at least 91%, at least 92%, at least 93%, at least 94%, at least 95%, at least 96%, at least 97%, at least 98%, or at least 99% identical to the nucleic acid sequence of SEQ ID NO: 2409; a sequence encoding microdystrophin comprising or consisting of a nucleic acid sequence that is at least 85%, at least 86%, at least 87%, at least 88%, at least 89%, at least 90%, at least 91%, at least 92%, at least 93%, at least 94%, at least 95%, at least 96%, at least 97%, at least 98%, or at least 99% identical to the nucleic acid sequence of SEQ ID NO: 2407; a first DRG de-targeting miRNA binding site comprising or consisting of a nucleic acid sequence that is at least 85%, at least 86%, at least 87%, at least 88%, at least 89%, at least 90%, at least 91%, at least 92%, at least 93%, at least 94%, at least 95%, at least 96%, at least 97%, at least 98%, or at least 99% identical to the nucleic acid sequence of SEQ ID NO: 2399; a second DRG de-targeting miRNA binding site comprising or consisting of a nucleic acid sequence that is at least 85%, at least 86%, at least 87%, at least 88%, at least 89%, at least 90%, at least 91%, at least 92%, at least 93%, at least 94%, at least 95%, at least 96%, at least 97%, at least 98%, or at least 99% identical to the nucleic acid sequence of SEQ ID NO: 2399; a PolyA signal comprising or consisting of a nucleic acid sequence that is at least 85%, at least 86%, at least 87%, at least 88%, at least 89%, at least 90%, at least 91%, at least 92%, at least 93%, at least 94%, at least 95%, at least 96%, at least 97%, at least 98%, or at least 99% identical to the nucleic acid sequence of SEQ ID NO: 2410; and a 3′ ITR comprising or consisting of a nucleic acid sequence that is at least 85%, at least 86%, at least 87%, at least 88%, at least 89%, at least 90%, at least 91%, at least 92%, at least 93%, at least 94%, at least 95%, at least 96%, at least 97%, at least 98%, or at least 99% identical to the nucleic acid sequence of SEQ ID NO: 2411.

[0387] In another example, the recombinant nucleic acid comprises a 5′ ITR comprising or consisting of a nucleic acid sequence that is at least 85%, at least 86%, at least 87%, at least 88%, at least 89%, at least 90%, at least 91%, at least 92%, at least 93%, at least 94%, at least 95%, at least 96%, at least 97%, at least 98%, or at least 99% identical to the nucleic acid sequence of SEQ ID NO: 2408; a promoter comprising or consisting of a nucleic acid sequence that is at least 85%, at least 86%, at least 87%, at least 88%, at least 89%, at least 90%, at least 91%, at least 92%, at least 93%, at least 94%, at least 95%, at least 96%, at least 97%, at least 98%, or at least 99% identical to the nucleic acid sequence of SEQ ID NO: 2404; an intron comprising or consisting of a nucleic acid sequence that is at least 85%, at least 86%, at least 87%, at least 88%, at least 89%, at least 90%, at least 91%, at least 92%, at least 93%, at least 94%, at least 95%, at least 96%, at least 97%, at least 98%, or at least 99% identical to the nucleic acid sequence of SEQ ID NO: 2409; a sequence encoding microdystrophin comprising or consisting of a nucleic acid sequence that is at least 85%, at least 86%, at least 87%, at least 88%, at least 89%, at least 90%, at least 91%, at least 92%, at least 93%, at least 94%, at least 95%, at least 96%, at least 97%, at least 98%, or at least 99% identical to the nucleic acid sequence of SEQ ID NO: 2407; a first DRG de-targeting miRNA binding site comprising or consisting of a nucleic acid sequence that is at least 85%, at least 86%, at least 87%, at least 88%, at least 89%, at least 90%, at least 91%, at least 92%, at least 93%, at least 94%, at least 95%, at least 96%, at least 97%, at least 98%, or at least 99% identical to the nucleic acid sequence of SEQ ID NO: 2399; a second DRG de-targeting miRNA binding site comprising or consisting of a nucleic acid sequence that is at least 85%, at least 86%, at least 87%, at least 88%, at least 89%, at least 90%, at least 91%, at least 92%, at least 93%, at least 94%, at least 95%, at least 96%, at least 97%, at least 98%, or at least 99% identical to the nucleic acid sequence of SEQ ID NO: 2399; a PolyA signal comprising or consisting of a nucleic acid sequence that is at least 85%, at least 86%, at least 87%, at least 88%, at least 89%, at least 90%, at least 91%, at least 92%, at least 93%, at least 94%, at least 95%, at least 96%, at least 97%, at least 98%, or at least 99% identical to the nucleic acid sequence of SEQ ID NO: 2410; and a 3′ ITR comprising or consisting of a nucleic acid sequence that is at least 85%, at least 86%, at least 87%, at least 88%, at least 89%, at least 90%, at least 91%, at least 92%, at least 93%, at least 94%, at least 95%, at least 96%, at least 97%, at least 98%, or at least 99% identical to the nucleic acid sequence of SEQ ID NO: 2411.

[0388] In another example, the recombinant nucleic acid comprises a 5′ ITR comprising or consisting of a nucleic acid sequence that is at least 85%, at least 86%, at least 87%, at least 88%, at least 89%, at least 90%, at least 91%, at least 92%, at least 93%, at least 94%, at least 95%, at least 96%, at least 97%, at least 98%, or at least 99% identical to the nucleic acid sequence of SEQ ID NO: 2408; a promoter comprising or consisting of a nucleic acid sequence that is at least 85%, at least 86%, at least 87%, at least 88%, at least 89%, at least 90%, at least 91%, at least 92%, at least 93%, at least 94%, at least 95%, at least 96%, at least 97%, at least 98%, or at least 99% identical to the nucleic acid sequence of SEQ ID NO: 2402; an intron comprising or consisting of a nucleic acid sequence that is at least 85%, at least 86%, at least 87%, at least 88%, at least 89%, at least 90%, at least 91%, at least 92%, at least 93%, at least 94%, at least 95%, at least 96%, at least 97%, at least 98%, or at least 99% identical to the nucleic acid sequence of SEQ ID NO: 2409; a sequence encoding microdystrophin comprising or consisting of a nucleic acid sequence that is at least 85%, at least 86%, at least 87%, at least 88%, at least 89%, at least 90%, at least 91%, at least 92%, at least 93%, at least 94%, at least 95%, at least 96%, at least 97%, at least 98%, or at least 99% identical to the nucleic acid sequence of SEQ ID NO: 2407; a first DRG de-targeting miRNA binding site comprising or consisting of a nucleic acid sequence that is at least 85%, at least 86%, at least 87%, at least 88%, at least 89%, at least 90%, at least 91%, at least 92%, at least 93%, at least 94%, at least 95%, at least 96%, at least 97%, at least 98%, or at least 99% identical to the nucleic acid sequence of SEQ ID NO: 2400; a second DRG de-targeting miRNA binding site comprising or consisting of a nucleic acid sequence that is at least 85%, at least 86%, at least 87%, at least 88%, at least 89%, at least 90%, at least 91%, at least 92%, at least 93%, at least 94%, at least 95%, at least 96%, at least 97%, at least 98%, or at least 99% identical to the nucleic acid sequence of SEQ ID NO: 2400; a PolyA signal comprising or consisting of a nucleic acid sequence that is at least 85%, at least 86%, at least 87%, at least 88%, at least 89%, at least 90%, at least 91%, at least 92%, at least 93%, at least 94%, at least 95%, at least 96%, at least 97%, at least 98%, or at least 99% identical to the nucleic acid sequence of SEQ ID NO: 2410; and a 3′ ITR comprising or consisting of a nucleic acid sequence that is at least 85%, at least 86%, at least 87%, at least 88%, at least 89%, at least 90%, at least 91%, at least 92%, at least 93%, at least 94%, at least 95%, at least 96%, at least 97%, at least 98%, or at least 99% identical to the nucleic acid sequence of SEQ ID NO: 2411.

[0389] In another example, the recombinant nucleic acid comprises a 5′ ITR comprising or consisting of a nucleic acid sequence that is at least 85%, at least 86%, at least 87%, at least 88%, at least 89%, at least 90%, at least 91%, at least 92%, at least 93%, at least 94%, at least 95%, at least 96%, at least 97%, at least 98%, or at least 99% identical to the nucleic acid sequence of SEQ ID NO: 2408; a promoter comprising or consisting of a nucleic acid sequence that is at least 85%, at least 86%, at least 87%, at least 88%, at least 89%, at least 90%, at least 91%, at least 92%, at least 93%, at least 94%, at least 95%, at least 96%, at least 97%, at least 98%, or at least 99% identical to the nucleic acid sequence of SEQ ID NO: 2403; an intron comprising or consisting of a nucleic acid sequence that is at least 85%, at least 86%, at least 87%, at least 88%, at least 89%, at least 90%, at least 91%, at least 92%, at least 93%, at least 94%, at least 95%, at least 96%, at least 97%, at least 98%, or at least 99% identical to the nucleic acid sequence of SEQ ID NO: 2409; a sequence encoding microdystrophin comprising or consisting of a nucleic acid sequence that is at least 85%, at least 86%, at least 87%, at least 88%, at least 89%, at least 90%, at least 91%, at least 92%, at least 93%, at least 94%, at least 95%, at least 96%, at least 97%, at least 98%, or at least 99% identical to the nucleic acid sequence of SEQ ID NO: 2407; a first DRG de-targeting miRNA binding site comprising or consisting of a nucleic acid sequence that is at least 85%, at least 86%, at least 87%, at least 88%, at least 89%, at least 90%, at least 91%, at least 92%, at least 93%, at least 94%, at least 95%, at least 96%, at least 97%, at least 98%, or at least 99% identical to the nucleic acid sequence of SEQ ID NO: 2400; a second DRG de-targeting miRNA binding site comprising or consisting of a nucleic acid sequence that is at least 85%, at least 86%, at least 87%, at least 88%, at least 89%, at least 90%, at least 91%, at least 92%, at least 93%, at least 94%, at least 95%, at least 96%, at least 97%, at least 98%, or at least 99% identical to the nucleic acid sequence of SEQ ID NO: 2400; a PolyA signal comprising or consisting of a nucleic acid sequence that is at least 85%, at least 86%, at least 87%, at least 88%, at least 89%, at least 90%, at least 91%, at least 92%, at least 93%, at least 94%, at least 95%, at least 96%, at least 97%, at least 98%, or at least 99% identical to the nucleic acid sequence of SEQ ID NO: 2410; and a 3′ ITR comprising or consisting of a nucleic acid sequence that is at least 85%, at least 86%, at least 87%, at least 88%, at least 89%, at least 90%, at least 91%, at least 92%, at least 93%, at least 94%, at least 95%, at least 96%, at least 97%, at least 98%, or at least 99% identical to the nucleic acid sequence of SEQ ID NO: 2411.

[0390] In another example, the recombinant nucleic acid comprises a 5′ ITR comprising or consisting of a nucleic acid sequence that is at least 85%, at least 86%, at least 87%, at least 88%, at least 89%, at least 90%, at least 91%, at least 92%, at least 93%, at least 94%, at least 95%, at least 96%, at least 97%, at least 98%, or at least 99% identical to the nucleic acid sequence of SEQ ID NO: 2408; a promoter comprising or consisting of a nucleic acid sequence that is at least 85%, at least 86%, at least 87%, at least 88%, at least 89%, at least 90%, at least 91%, at least 92%, at least 93%, at least 94%, at least 95%, at least 96%, at least 97%, at least 98%, or at least 99% identical to the nucleic acid sequence of SEQ ID NO: 2404; an intron comprising or consisting of a nucleic acid sequence that is at least 85%, at least 86%, at least 87%, at least 88%, at least 89%, at least 90%, at least 91%, at least 92%, at least 93%, at least 94%, at least 95%, at least 96%, at least 97%, at least 98%, or at least 99% identical to the nucleic acid sequence of SEQ ID NO: 2409; a sequence encoding microdystrophin comprising or consisting of a nucleic acid sequence that is at least 85%, at least 86%, at least 87%, at least 88%, at least 89%, at least 90%, at least 91%, at least 92%, at least 93%, at least 94%, at least 95%, at least 96%, at least 97%, at least 98%, or at least 99% identical to the nucleic acid sequence of SEQ ID NO: 2407; a first DRG de-targeting miRNA binding site comprising or consisting of a nucleic acid sequence that is at least 85%, at least 86%, at least 87%, at least 88%, at least 89%, at least 90%, at least 91%, at least 92%, at least 93%, at least 94%, at least 95%, at least 96%, at least 97%, at least 98%, or at least 99% identical to the nucleic acid sequence of SEQ ID NO: 2400; a second DRG de-targeting miRNA binding site comprising or consisting of a nucleic acid sequence that is at least 85%, at least 86%, at least 87%, at least 88%, at least 89%, at least 90%, at least 91%, at least 92%, at least 93%, at least 94%, at least 95%, at least 96%, at least 97%, at least 98%, or at least 99% identical to the nucleic acid sequence of SEQ ID NO: 2400; a PolyA signal comprising or consisting of a nucleic acid sequence that is at least 85%, at least 86%, at least 87%, at least 88%, at least 89%, at least 90%, at least 91%, at least 92%, at least 93%, at least 94%, at least 95%, at least 96%, at least 97%, at least 98%, or at least 99% identical to the nucleic acid sequence of SEQ ID NO: 2410; and a 3′ ITR comprising or consisting of a nucleic acid sequence that is at least 85%, at least 86%, at least 87%, at least 88%, at least 89%, at least 90%, at least 91%, at least 92%, at least 93%, at least 94%, at least 95%, at least 96%, at least 97%, at least 98%, or at least 99% identical to the nucleic acid sequence of SEQ ID NO: 2411.

[0391] In another example, the recombinant nucleic acid comprises a 5′ ITR comprising or consisting of a nucleic acid sequence that is at least 85%, at least 86%, at least 87%, at least 88%, at least 89%, at least 90%, at least 91%, at least 92%, at least 93%, at least 94%, at least 95%, at least 96%, at least 97%, at least 98%, or at least 99% identical to the nucleic acid sequence of SEQ ID NO: 2408; a promoter comprising or consisting of a nucleic acid sequence that is at least 85%, at least 86%, at least 87%, at least 88%, at least 89%, at least 90%, at least 91%, at least 92%, at least 93%, at least 94%, at least 95%, at least 96%, at least 97%, at least 98%, or at least 99% identical to the nucleic acid sequence of SEQ ID NO: 2402; an intron comprising or consisting of a nucleic acid sequence that is at least 85%, at least 86%, at least 87%, at least 88%, at least 89%, at least 90%, at least 91%, at least 92%, at least 93%, at least 94%, at least 95%, at least 96%, at least 97%, at least 98%, or at least 99% identical to the nucleic acid sequence of SEQ ID NO: 2409; a sequence encoding microdystrophin comprising or consisting of a nucleic acid sequence that is at least 85%, at least 86%, at least 87%, at least 88%, at least 89%, at least 90%, at least 91%, at least 92%, at least 93%, at least 94%, at least 95%, at least 96%, at least 97%, at least 98%, or at least 99% identical to the nucleic acid sequence of SEQ ID NO: 2407; a first DRG de-targeting miRNA binding site comprising or consisting of a nucleic acid sequence that is at least 85%, at least 86%, at least 87%, at least 88%, at least 89%, at least 90%, at least 91%, at least 92%, at least 93%, at least 94%, at least 95%, at least 96%, at least 97%, at least 98%, or at least 99% identical to the nucleic acid sequence of SEQ ID NO: 2401; a second DRG de-targeting miRNA binding site comprising or consisting of a nucleic acid sequence that is at least 85%, at least 86%, at least 87%, at least 88%, at least 89%, at least 90%, at least 91%, at least 92%, at least 93%, at least 94%, at least 95%, at least 96%, at least 97%, at least 98%, or at least 99% identical to the nucleic acid sequence of SEQ ID NO: 2401; a PolyA signal comprising or consisting of a nucleic acid sequence that is at least 85%, at least 86%, at least 87%, at least 88%, at least 89%, at least 90%, at least 91%, at least 92%, at least 93%, at least 94%, at least 95%, at least 96%, at least 97%, at least 98%, or at least 99% identical to the nucleic acid sequence of SEQ ID NO: 2410; and a 3′ ITR comprising or consisting of a nucleic acid sequence that is at least 85%, at least 86%, at least 87%, at least 88%, at least 89%, at least 90%, at least 91%, at least 92%, at least 93%, at least 94%, at least 95%, at least 96%, at least 97%, at least 98%, or at least 99% identical to the nucleic acid sequence of SEQ ID NO: 2411.

[0392] In another example, the recombinant nucleic acid comprises a 5′ ITR comprising or consisting of a nucleic acid sequence that is at least 85%, at least 86%, at least 87%, at least 88%, at least 89%, at least 90%, at least 91%, at least 92%, at least 93%, at least 94%, at least 95%, at least 96%, at least 97%, at least 98%, or at least 99% identical to the nucleic acid sequence of SEQ ID NO: 2408; a promoter comprising or consisting of a nucleic acid sequence that is at least 85%, at least 86%, at least 87%, at least 88%, at least 89%, at least 90%, at least 91%, at least 92%, at least 93%, at least 94%, at least 95%, at least 96%, at least 97%, at least 98%, or at least 99% identical to the nucleic acid sequence of SEQ ID NO: 2403; an intron comprising or consisting of a nucleic acid sequence that is at least 85%, at least 86%, at least 87%, at least 88%, at least 89%, at least 90%, at least 91%, at least 92%, at least 93%, at least 94%, at least 95%, at least 96%, at least 97%, at least 98%, or at least 99% identical to the nucleic acid sequence of SEQ ID NO: 2409; a sequence encoding microdystrophin comprising or consisting of a nucleic acid sequence that is at least 85%, at least 86%, at least 87%, at least 88%, at least 89%, at least 90%, at least 91%, at least 92%, at least 93%, at least 94%, at least 95%, at least 96%, at least 97%, at least 98%, or at least 99% identical to the nucleic acid sequence of SEQ ID NO: 2407; a first DRG de-targeting miRNA binding site comprising or consisting of a nucleic acid sequence that is at least 85%, at least 86%, at least 87%, at least 88%, at least 89%, at least 90%, at least 91%, at least 92%, at least 93%, at least 94%, at least 95%, at least 96%, at least 97%, at least 98%, or at least 99% identical to the nucleic acid sequence of SEQ ID NO: 2401; a second DRG de-targeting miRNA binding site comprising or consisting of a nucleic acid sequence that is at least 85%, at least 86%, at least 87%, at least 88%, at least 89%, at least 90%, at least 91%, at least 92%, at least 93%, at least 94%, at least 95%, at least 96%, at least 97%, at least 98%, or at least 99% identical to the nucleic acid sequence of SEQ ID NO: 2401; a PolyA signal comprising or consisting of a nucleic acid sequence that is at least 85%, at least 86%, at least 87%, at least 88%, at least 89%, at least 90%, at least 91%, at least 92%, at least 93%, at least 94%, at least 95%, at least 96%, at least 97%, at least 98%, or at least 99% identical to the nucleic acid sequence of SEQ ID NO: 2410; and a 3′ ITR comprising or consisting of a nucleic acid sequence that is at least 85%, at least 86%, at least 87%, at least 88%, at least 89%, at least 90%, at least 91%, at least 92%, at least 93%, at least 94%, at least 95%, at least 96%, at least 97%, at least 98%, or at least 99% identical to the nucleic acid sequence of SEQ ID NO: 2411.

[0393] In another example, the recombinant nucleic acid comprises a 5′ ITR comprising or consisting of a nucleic acid sequence that is at least 85%, at least 86%, at least 87%, at least 88%, at least 89%, at least 90%, at least 91%, at least 92%, at least 93%, at least 94%, at least 95%, at least 96%, at least 97%, at least 98%, or at least 99% identical to the nucleic acid sequence of SEQ ID NO: 2408; a promoter comprising or consisting of a nucleic acid sequence that is at least 85%, at least 86%, at least 87%, at least 88%, at least 89%, at least 90%, at least 91%, at least 92%, at least 93%, at least 94%, at least 95%, at least 96%, at least 97%, at least 98%, or at least 99% identical to the nucleic acid sequence of SEQ ID NO: 2404; an intron comprising or consisting of a nucleic acid sequence that is at least 85%, at least 86%, at least 87%, at least 88%, at least 89%, at least 90%, at least 91%, at least 92%, at least 93%, at least 94%, at least 95%, at least 96%, at least 97%, at least 98%, or at least 99% identical to the nucleic acid sequence of SEQ ID NO: 2409; a sequence encoding microdystrophin comprising or consisting of a nucleic acid sequence that is at least 85%, at least 86%, at least 87%, at least 88%, at least 89%, at least 90%, at least 91%, at least 92%, at least 93%, at least 94%, at least 95%, at least 96%, at least 97%, at least 98%, or at least 99% identical to the nucleic acid sequence of SEQ ID NO: 2407; a first DRG de-targeting miRNA binding site comprising or consisting of a nucleic acid sequence that is at least 85%, at least 86%, at least 87%, at least 88%, at least 89%, at least 90%, at least 91%, at least 92%, at least 93%, at least 94%, at least 95%, at least 96%, at least 97%, at least 98%, or at least 99% identical to the nucleic acid sequence of SEQ ID NO: 2401; a second DRG de-targeting miRNA binding site comprising or consisting of a nucleic acid sequence that is at least 85%, at least 86%, at least 87%, at least 88%, at least 89%, at least 90%, at least 91%, at least 92%, at least 93%, at least 94%, at least 95%, at least 96%, at least 97%, at least 98%, or at least 99% identical to the nucleic acid sequence of SEQ ID NO: 2401; a PolyA signal comprising or consisting of a nucleic acid sequence that is at least 85%, at least 86%, at least 87%, at least 88%, at least 89%, at least 90%, at least 91%, at least 92%, at least 93%, at least 94%, at least 95%, at least 96%, at least 97%, at least 98%, or at least 99% identical to the nucleic acid sequence of SEQ ID NO: 2410; and a 3′ ITR comprising or consisting of a nucleic acid sequence that is at least 85%, at least 86%, at least 87%, at least 88%, at least 89%, at least 90%, at least 91%, at least 92%, at least 93%, at least 94%, at least 95%, at least 96%, at least 97%, at least 98%, or at least 99% identical to the nucleic acid sequence of SEQ ID NO: 2411.

[0394] In another example, the recombinant nucleic acid comprises a 5′ITR comprising or consisting of the nucleic acid sequence of SEQ ID NO: 2408; a promoter comprising or consisting of the nucleic acid sequence of SEQ ID NO: 2402; an intron comprising or consisting of the nucleic acid sequence of SEQ ID NO: 2409; a sequence encoding microdystrophin comprising or consisting of the nucleic acid sequence of SEQ ID NO: 2405; a first DRG de-targeting miRNA binding site comprising or consisting of the nucleic acid sequence of SEQ ID NO: 2399; a second DRG de-targeting miRNA binding site comprising or consisting of the nucleic acid sequence of SEQ ID NO: 2399; a PolyA signal comprising or consisting of the nucleic acid sequence of SEQ ID NO: 2410; and a 3′ ITR comprising or consisting of the nucleic acid sequence of SEQ ID NO: 2411.

[0395] In another example, the recombinant nucleic acid comprises a 5′ ITR comprising or consisting of the nucleic acid sequence of SEQ ID NO: 2408; a promoter comprising or consisting of the nucleic acid sequence of SEQ ID NO: 2403; an intron comprising or consisting of the nucleic acid sequence of SEQ ID NO: 2409; a sequence encoding microdystrophin comprising or consisting of the nucleic acid sequence of SEQ ID NO: 2405; a first DRG de-targeting miRNA binding site comprising or consisting of the nucleic acid sequence of SEQ ID NO: 2399; a second DRG de-targeting miRNA binding site comprising or consisting of the nucleic acid sequence of SEQ ID NO: 2399; a PolyA signal comprising or consisting of the nucleic acid sequence of SEQ ID NO: 2410; and a 3′ ITR comprising or consisting of the nucleic acid sequence of SEQ ID NO: 2411.

[0396] In another example, the recombinant nucleic acid comprises a 5′ ITR comprising or consisting of the nucleic acid sequence of SEQ ID NO: 2408; a promoter comprising or consisting of the nucleic acid sequence of SEQ ID NO: 2404; an intron comprising or consisting of the nucleic acid sequence of SEQ ID NO: 2409; a sequence encoding microdystrophin comprising or consisting of the nucleic acid sequence of SEQ ID NO: 2405; a first DRG de-targeting miRNA binding site comprising or consisting of the nucleic acid sequence of SEQ ID NO: 2399; a second DRG de-targeting miRNA binding site comprising or consisting of the nucleic acid sequence of SEQ ID NO: 2399; a PolyA signal comprising or consisting of the nucleic acid sequence of SEQ ID NO: 2410; and a 3′ ITR comprising or consisting of the nucleic acid sequence of SEQ ID NO: 2411.

[0397] In another example, the recombinant nucleic acid comprises a 5′ ITR comprising or consisting of the nucleic acid sequence of SEQ ID NO: 2408; a promoter comprising or consisting of the nucleic acid sequence of SEQ ID NO: 2402; an intron comprises or consists of the nucleic acid sequence of SEQ ID NO: 2409; a sequence encoding microdystrophin comprising or consisting of the nucleic acid sequence of SEQ ID NO: 2405; a first DRG de-targeting miRNA binding site comprising or consisting of the nucleic acid sequence of SEQ ID NO: 2400; a second DRG de-targeting miRNA binding site comprising or consisting of the nucleic acid sequence of SEQ ID NO: 2400; a PolyA signal comprising or consisting of the nucleic acid sequence of SEQ ID NO: 2410; and a 3′ ITR comprising or consisting of the nucleic acid sequence of SEQ ID NO: 2411.

[0398] In another example, the recombinant nucleic acid comprises a 5′ ITR comprising or consisting of the nucleic acid sequence of SEQ ID NO: 2408; a promoter comprising or consisting of the nucleic acid sequence of SEQ ID NO: 2403; an intron comprising or consisting of the nucleic acid sequence of SEQ ID NO: 2409; a sequence encoding microdystrophin comprising or consisting of the nucleic acid sequence of SEQ ID NO: 2405; a first DRG de-targeting miRNA binding site comprising or consisting of the nucleic acid sequence of SEQ ID NO: 2400; a second DRG de-targeting miRNA binding site comprising or consisting of the nucleic acid sequence of SEQ ID NO: 2400; a PolyA signal comprising or consisting of the nucleic acid sequence of SEQ ID NO: 2410; and a 3′ ITR comprising or consisting of the nucleic acid sequence of SEQ ID NO: 2411.

[0399] In another example, the recombinant nucleic acid comprises a 5′ ITR comprising or consisting of the nucleic acid sequence of SEQ ID NO: 2408; a promoter comprising or consisting of the nucleic acid sequence of SEQ ID NO: 2404; an intron comprises or consists of the nucleic acid sequence of SEQ ID NO: 2409; a sequence encoding microdystrophin comprising or consisting of the nucleic acid sequence of SEQ ID NO: 2405; a first DRG de-targeting miRNA binding site comprising or consisting of the nucleic acid sequence of SEQ ID NO: 2400; a second DRG de-targeting miRNA binding site comprising or consisting of the nucleic acid sequence of SEQ ID NO: 2400; a PolyA signal comprising or consisting of the nucleic acid sequence of SEQ ID NO: 2410; and a 3′ ITR comprising or consisting of the nucleic acid sequence of SEQ ID NO: 2411.

[0400] In another example, the recombinant nucleic acid comprises a 5′ ITR comprising or consisting of the nucleic acid sequence of SEQ ID NO: 2408; a promoter comprising or consisting of the nucleic acid sequence of SEQ ID NO: 2402; an intron comprising or consisting of the nucleic acid sequence of SEQ ID NO: 2409; a sequence encoding microdystrophin comprising or consisting of the nucleic acid sequence of SEQ ID NO: 2405; a first DRG de-targeting miRNA binding site comprising or consisting of the nucleic acid sequence of SEQ ID NO: 2401; a first DRG de-targeting miRNA binding site comprising or consisting of the nucleic acid sequence of SEQ ID NO: 2401; a PolyA signal comprising or consisting of the nucleic acid sequence of SEQ ID NO: 2410; and a 3′ ITR comprising or consisting of the nucleic acid sequence of SEQ ID NO: 2411.

[0401] In another example, the recombinant nucleic acid comprises a 5′ ITR comprising or consisting of the nucleic acid sequence of SEQ ID NO: 2408; a promoter comprising or consisting of the nucleic acid sequence of SEQ ID NO: 2403; an intron comprising or consisting of the nucleic acid sequence of SEQ ID NO: 2409; a sequence encoding microdystrophin comprising or consisting of the nucleic acid sequence of SEQ ID NO: 2405; a first DRG de-targeting miRNA binding site comprising or consisting of the nucleic acid sequence of SEQ ID NO: 2401; a second DRG de-targeting miRNA binding site comprising or consisting of the nucleic acid sequence of SEQ ID NO: 2401; a PolyA signal comprising or consisting of the nucleic acid sequence of SEQ ID NO: 2410; and a 3′ ITR comprising or consisting of the nucleic acid sequence of SEQ ID NO: 2411.

[0402] In another example, the recombinant nucleic acid comprises a 5′ITR comprising or consisting of the nucleic acid sequence of SEQ ID NO: 2408; a promoter comprising or consisting of the nucleic acid sequence of SEQ ID NO: 2404; an intron comprises or consists of the nucleic acid sequence of SEQ ID NO: 2409; a sequence encoding microdystrophin comprising or consisting of the nucleic acid sequence of SEQ ID NO: 2405; a first DRG de-targeting miRNA binding site comprising or consisting of the nucleic acid sequence of SEQ ID NO: 2401; a second DRG de-targeting miRNA binding site comprising or consisting of the nucleic acid sequence of SEQ ID NO: 2401; a PolyA signal comprising or consisting of the nucleic acid sequence of SEQ ID NO: 2410; and a 3′ ITR comprising or consisting of the nucleic acid sequence of SEQ ID NO: 2411.

[0403] In another example, the recombinant nucleic acid comprises a 5′ ITR comprising or consisting of the nucleic acid sequence of SEQ ID NO: 2408; a promoter comprising or consisting of the nucleic acid sequence of SEQ ID NO: 2402; an intron comprises or consists of the nucleic acid sequence of SEQ ID NO: 2409; a sequence encoding microdystrophin comprising or consisting of the nucleic acid sequence of SEQ ID NO: 2406; a first DRG de-targeting miRNA binding site comprising or consisting of the nucleic acid sequence of SEQ ID NO: 2399; a second DRG de-targeting miRNA binding site comprising or consisting of the nucleic acid sequence of SEQ ID NO: 2399; a PolyA signal comprising or consisting of the nucleic acid sequence of SEQ ID NO: 2410; and a 3′ ITR comprising or consisting of the nucleic acid sequence of SEQ ID NO: 2411.

[0404] In another example, the recombinant nucleic acid comprises a 5′ comprising or consisting of the nucleic acid sequence of SEQ ID NO: 2408; a promoter comprising or consisting of the nucleic acid sequence of SEQ ID NO: 2403; an intron comprising or consisting of the nucleic acid sequence of SEQ ID NO: 2409; a sequence encoding microdystrophin comprising or consisting of the nucleic acid sequence of SEQ ID NO: 2406; a first DRG de-targeting miRNA binding site comprising or consisting of the nucleic acid sequence of SEQ ID NO: 2399; a second DRG de-targeting miRNA binding site comprising or consisting of the nucleic acid sequence of SEQ ID NO: 2399; a PolyA signal comprising or consisting of the nucleic acid sequence of SEQ ID NO: 2410; and a 3′ ITR comprising or consisting of the nucleic acid sequence of SEQ ID NO: 2411.

[0405] In another example, the recombinant nucleic acid comprises a 5′ ITR comprising or consisting of the nucleic acid sequence of SEQ ID NO: 2408; a promoter comprising or consisting of the nucleic acid sequence of SEQ ID NO: 2404; an intron comprising or consisting of the nucleic acid sequence of SEQ ID NO: 2409; a sequence encoding microdystrophin comprising or consisting of the nucleic acid sequence of SEQ ID NO: 2406; a first DRG de-targeting miRNA binding site comprising or consisting of the nucleic acid sequence of SEQ ID NO: 2399; a second DRG de-targeting miRNA binding site comprising or consisting of the nucleic acid sequence of SEQ ID NO: 2399; a PolyA signal comprising or consisting of the nucleic acid sequence of SEQ ID NO: 2410; and a 3′ ITR comprising or consisting of the nucleic acid sequence of SEQ ID NO: 2411.

[0406] In another example, the recombinant nucleic acid comprises a 5′ ITR comprising or consisting of the nucleic acid sequence of SEQ ID NO: 2408; a promoter comprising or consisting of the nucleic acid sequence of SEQ ID NO: 2402; an intron comprising or consisting of the nucleic acid sequence of SEQ ID NO: 2409; a sequence encoding microdystrophin comprising or consisting of the nucleic acid sequence of SEQ ID NO: 2406; a first DRG de-targeting miRNA binding site comprising or consisting of the nucleic acid sequence of SEQ ID NO: 2400; a second DRG de-targeting miRNA binding site comprising or consisting of the nucleic acid sequence of SEQ ID NO: 2400; a PolyA signal comprising or consisting of the nucleic acid sequence of SEQ ID NO: 2410; and a 3′ ITR comprising or consisting of the nucleic acid sequence of SEQ ID NO: 2411.

[0407] In another example, the recombinant nucleic acid comprises a 5′ITR comprising or consisting of the nucleic acid sequence of SEQ ID NO: 2408; a promoter comprising or consisting of the nucleic acid sequence of SEQ ID NO: 2403; an intron comprising or consisting of the nucleic acid sequence of SEQ ID NO: 2409; a sequence encoding microdystrophin comprising or consisting of the nucleic acid sequence of SEQ ID NO: 2406; a first DRG de-targeting miRNA binding site comprising or consisting of the nucleic acid sequence of SEQ ID NO: 2400; a second DRG de-targeting miRNA binding site comprising or consisting of the nucleic acid sequence of SEQ ID NO: 2400; a PolyA signal comprising or consisting of the nucleic acid sequence of SEQ ID NO: 2410; and a 3′ ITR comprising or consisting of the nucleic acid sequence of SEQ ID NO: 2411.

[0408] In another example, the recombinant nucleic acid comprises a 5′ITR comprising or consisting of the nucleic acid sequence of SEQ ID NO: 2408; a promoter comprising or consisting of the nucleic acid sequence of SEQ ID NO: 2404; an intron comprising or consisting of the nucleic acid sequence of SEQ ID NO: 2409; a sequence encoding microdystrophin comprising or consisting of the nucleic acid sequence of SEQ ID NO: 2406; a first DRG de-targeting miRNA binding site comprising or consisting of the nucleic acid sequence of SEQ ID NO: 2400; a second DRG de-targeting miRNA binding site comprising or consisting of the nucleic acid sequence of SEQ ID NO: 2400; a PolyA signal comprising or consisting of the nucleic acid sequence of SEQ ID NO: 2410; and a 3′ ITR comprising or consisting of the nucleic acid sequence of SEQ ID NO: 2411.

[0409] In another example, the recombinant nucleic acid comprises a 5′ ITR comprising or consisting of the nucleic acid sequence of SEQ ID NO: 2408; a promoter comprising or consisting of the nucleic acid sequence of SEQ ID NO: 2402; an intron comprising or consisting of the nucleic acid sequence of SEQ ID NO: 2409; a sequence encoding microdystrophin comprising or consisting of the nucleic acid sequence of SEQ ID NO: 2406; a first DRG de-targeting miRNA binding site comprising or consisting of the nucleic acid sequence of SEQ ID NO: 2401; a second DRG de-targeting miRNA binding site comprising or consisting of the nucleic acid sequence of SEQ ID NO: 2401; a PolyA signal comprising or consisting of the nucleic acid sequence of SEQ ID NO: 2410; and a 3′ ITR comprising or consisting of the nucleic acid sequence of SEQ ID NO: 2411.

[0410] In another example, the recombinant nucleic acid comprises a 5′ ITR comprising or consisting of the nucleic acid sequence of SEQ ID NO: 2408; a promoter comprising or consisting of the nucleic acid sequence of SEQ ID NO: 2403; an intron comprising or consisting of the nucleic acid sequence of SEQ ID NO: 2409; a sequence encoding microdystrophin comprising or consisting of the nucleic acid sequence of SEQ ID NO: 2406; a first DRG de-targeting miRNA binding site comprising or consisting of the nucleic acid sequence of SEQ ID NO: 2401; a second DRG de-targeting miRNA binding site comprising or consisting of the nucleic acid sequence of SEQ ID NO: 2401; a PolyA signal comprising or consisting of the nucleic acid sequence of SEQ ID NO: 2410; and a 3′ ITR comprising or consisting of the nucleic acid sequence of SEQ ID NO: 2411.

[0411] In another example, the recombinant nucleic acid comprises a 5′ ITR comprising or consisting of the nucleic acid sequence of SEQ ID NO: 2408; a promoter comprising or consisting of the nucleic acid sequence of SEQ ID NO: 2404; an intron comprising or consisting of the nucleic acid sequence of SEQ ID NO: 2409; a sequence encoding microdystrophin comprising or consisting of the nucleic acid sequence of SEQ ID NO: 2406; a first DRG de-targeting miRNA binding site comprising or consisting of the nucleic acid sequence of SEQ ID NO: 2401; a second DRG de-targeting miRNA binding site comprising or consisting of the nucleic acid sequence of SEQ ID NO: 2401; a PolyA signal comprising or consisting of the nucleic acid sequence of SEQ ID NO: 2410; and a 3′ ITR comprising or consisting of the nucleic acid sequence of SEQ ID NO: 2411.

[0412] In another example, the recombinant nucleic acid comprises a 5′ ITR comprising or consisting of the nucleic acid sequence of SEQ ID NO: 2408; a promoter comprising or consisting of the nucleic acid sequence of SEQ ID NO: 2402; an intron comprising or consisting of the nucleic acid sequence of SEQ ID NO: 2409; a sequence encoding microdystrophin comprising or consisting of the nucleic acid sequence of SEQ ID NO: 2407; a first DRG de-targeting miRNA binding site comprising or consisting of the nucleic acid sequence of SEQ ID NO: 2399; a second DRG de-targeting miRNA binding site comprising or consisting of the nucleic acid sequence of SEQ ID NO: 2399; a PolyA signal comprising or consisting of the nucleic acid sequence of SEQ ID NO: 2410; and a 3′ ITR comprising or consisting of the nucleic acid sequence of SEQ ID NO: 2411.

[0413] In another example, the recombinant nucleic acid comprises a 5′ITR comprising or consisting of the nucleic acid sequence of SEQ ID NO: 2408; a promoter comprising or consisting of the nucleic acid sequence of SEQ ID NO: 2403; an intron comprising or consisting of the nucleic acid sequence of SEQ ID NO: 2409; a sequence encoding microdystrophin comprising or consisting of the nucleic acid sequence of SEQ ID NO: 2407; a first DRG de-targeting miRNA binding site comprising or consisting of the nucleic acid sequence of SEQ ID NO: 2399; a second DRG de-targeting miRNA binding site comprising or consisting of the nucleic acid sequence of SEQ ID NO: 2399; a PolyA signal comprising or consisting of the nucleic acid sequence of SEQ ID NO: 2410; and a 3′ ITR comprising or consisting of the nucleic acid sequence of SEQ ID NO: 2411.

[0414] In another example, the recombinant nucleic acid comprises a 5′ITR comprising or consisting of the nucleic acid sequence of SEQ ID NO: 2408; a promoter comprising or consisting of the nucleic acid sequence of SEQ ID NO: 2404; an intron comprising or consisting of the nucleic acid sequence of SEQ ID NO: 2409; a sequence encoding microdystrophin comprising or consisting of the nucleic acid sequence of SEQ ID NO: 2407; a first DRG de-targeting miRNA binding site comprising or consisting of the nucleic acid sequence of SEQ ID NO: 2399; a second DRG de-targeting miRNA binding site comprising or consisting of the nucleic acid sequence of SEQ ID NO: 2399; a PolyA signal comprising or consisting of the nucleic acid sequence of SEQ ID NO: 2410; and a 3′ ITR comprising or consisting of the nucleic acid sequence of SEQ ID NO: 2411.

[0415] In another example, the recombinant nucleic acid comprises a 5′ ITR comprising or consisting of the nucleic acid sequence of SEQ ID NO: 2408; a promoter comprising or consisting of the nucleic acid sequence of SEQ ID NO: 2402; an intron comprising or consisting of the nucleic acid sequence of SEQ ID NO: 2409; a sequence encoding microdystrophin comprising or consisting of the nucleic acid sequence of SEQ ID NO: 2407; a first DRG de-targeting miRNA binding site comprising or consisting of the nucleic acid sequence of SEQ ID NO: 2400; a second DRG de-targeting miRNA binding site comprising or consisting of the nucleic acid sequence of SEQ ID NO: 2400; a PolyA signal comprising or consisting of the nucleic acid sequence of SEQ ID NO: 2410; and a 3′ ITR comprising or consisting of the nucleic acid sequence of SEQ ID NO: 2411.

[0416] In another example, the recombinant nucleic acid comprises a 5′ITR comprising or consisting of the nucleic acid sequence of SEQ ID NO: 2408; a promoter comprising or consisting of the nucleic acid sequence of SEQ ID NO: 2403; an intron comprising or consisting of the nucleic acid sequence of SEQ ID NO: 2409; a sequence encoding microdystrophin comprising or consisting of the nucleic acid sequence of SEQ ID NO: 2407; a first DRG de-targeting miRNA binding site comprising or consisting of the nucleic acid sequence of SEQ ID NO: 2400; a second DRG de-targeting miRNA binding site comprising or consisting of the nucleic acid sequence of SEQ ID NO: 2400; a PolyA signal comprising or consisting of the nucleic acid sequence of SEQ ID NO: 2410; and the 3′ ITR comprising or consisting of a nucleic acid sequence of SEQ ID NO: 2411.

[0417] In another example, the recombinant nucleic acid comprises a 5′ ITR comprising or consisting of the nucleic acid sequence of SEQ ID NO: 2408; a promoter comprising or consisting of the nucleic acid sequence of SEQ ID NO: 2404; an intron comprising or consisting of the nucleic acid sequence of SEQ ID NO: 2409; a sequence encoding microdystrophin comprising or consisting of the nucleic acid sequence of SEQ ID NO: 2407; a first DRG de-targeting miRNA binding site comprising or consisting of the nucleic acid sequence of SEQ ID NO: 2400; a second DRG de-targeting miRNA binding site comprising or consisting of the nucleic acid sequence of SEQ ID NO: 2400; a PolyA signal comprising or consisting of the nucleic acid sequence of SEQ ID NO: 2410; and a 3′ ITR comprising or consisting of the nucleic acid sequence of SEQ ID NO: 2411.

[0418] In another example, the recombinant nucleic acid comprises a 5′ ITR comprising or consisting of the nucleic acid sequence of SEQ ID NO: 2408; a promoter comprising or consisting of the nucleic acid sequence of SEQ ID NO: 2402; an intron comprising or consisting of the nucleic acid sequence of SEQ ID NO: 2409; a sequence encoding microdystrophin comprising or consisting of the nucleic acid sequence of SEQ ID NO: 2407; a first DRG de-targeting miRNA binding site comprising or consisting of the nucleic acid sequence of SEQ ID NO: 2401; a second DRG de-targeting miRNA binding site comprising or consisting of the nucleic acid sequence of SEQ ID NO: 2401; a PolyA signal comprising or consisting of the nucleic acid sequence of SEQ ID NO: 2410; and a 3′ ITR comprising or consisting of the nucleic acid sequence of SEQ ID NO: 2411.

[0419] In another example, the recombinant nucleic acid comprises a 5′ITR comprising or consisting of the nucleic acid sequence of SEQ ID NO: 2408; a promoter comprising or consisting of the nucleic acid sequence of SEQ ID NO: 2403; an intron comprising or consisting of the nucleic acid sequence of SEQ ID NO: 2409; a sequence encoding microdystrophin comprising or consisting of the nucleic acid sequence of SEQ ID NO: 2407; a first DRG de-targeting miRNA binding site comprising or consisting of the nucleic acid sequence of SEQ ID NO: 2401; a second DRG de-targeting miRNA binding site comprising or consisting of the nucleic acid sequence of SEQ ID NO: 2401; a PolyA signal comprising or consisting of the nucleic acid sequence of SEQ ID NO: 2410; and a 3′ ITR comprising or consisting of the nucleic acid sequence of SEQ ID NO: 2411.

[0420] In another example, the recombinant nucleic acid comprises a 5′ITR comprising or consisting of the nucleic acid sequence of SEQ ID NO: 2408; a promoter comprising or consisting of the nucleic acid sequence of SEQ ID NO: 2404; an intron comprising or consisting of the nucleic acid sequence of SEQ ID NO: 2409; a sequence encoding microdystrophin comprising or consisting of the nucleic acid sequence of SEQ ID NO: 2407; a first DRG de-targeting miRNA binding site comprising or consisting of the nucleic acid sequence of SEQ ID NO: 2401; a second DRG de-targeting miRNA binding site comprising or consisting of the nucleic acid sequence of SEQ ID NO: 2401; a PolyA signal comprising or consisting of the nucleic acid sequence of SEQ ID NO: 2410; and a 3′ ITR comprising or consisting of the nucleic acid sequence of SEQ ID NO: 2411.

[0421] In another example, the recombinant nucleic acid comprises or consists of a nucleic acid sequence that is at least 85%, at least 86%, at least 87%, at least 88%, at least 89%, at least 90%, at least 91%, at least 92%, at least 93%, at least 94%, at least 95%, at least 96%, at least 97%, at least 98%, or at least 99% identical to the nucleic acid sequence of SEQ ID NO: 2412. In another example, the recombinant nucleic acid comprises or consists of the nucleic acid sequence of SEQ ID NO: 2412.

[0422] In another example, the recombinant nucleic acid comprises or consists of a nucleic acid sequence that is at least 85%, at least 86%, at least 87%, at least 88%, at least 89%, at least 90%, at least 91%, at least 92%, at least 93%, at least 94%, at least 95%, at least 96%, at least 97%, at least 98%, or at least 99% identical to the nucleic acid sequence of SEQ ID NO: 2413. In another example, the recombinant nucleic acid comprises or consists of the nucleic acid sequence of SEQ ID NO: 2413.

[0423] In another example, the recombinant nucleic acid comprises or consists of a nucleic acid sequence that is at least 85%, at least 86%, at least 87%, at least 88%, at least 89%, at least 90%, at least 91%, at least 92%, at least 93%, at least 94%, at least 95%, at least 96%, at least 97%, at least 98%, or at least 99% identical to the nucleic acid sequence of SEQ ID NO: 2414. In another example, the recombinant nucleic acid comprises or consists of the nucleic acid sequence of SEQ ID NO: 2414.

[0424] In another example, the recombinant nucleic acid comprises or consists of a nucleic acid sequence that is at least 85%, at least 86%, at least 87%, at least 88%, at least 89%, at least 90%, at least 91%, at least 92%, at least 93%, at least 94%, at least 95%, at least 96%, at least 97%, at least 98%, or at least 99% identical to the nucleic acid sequence of SEQ ID NO: 2415. In another example, the recombinant nucleic acid comprises or consists of the nucleic acid sequence of SEQ ID NO: 2415.

[0425] In another example, the recombinant nucleic acid comprises or consists of a nucleic acid sequence that is at least 85%, at least 86%, at least 87%, at least 88%, at least 89%, at least 90%, at least 91%, at least 92%, at least 93%, at least 94%, at least 95%, at least 96%, at least 97%, at least 98%, or at least 99% identical to the nucleic acid sequence of SEQ ID NO: 2416. In another example, the recombinant nucleic acid comprises or consists of the nucleic acid sequence of SEQ ID NO: 2416.

[0426] In another example, the recombinant nucleic acid comprises or consists of a nucleic acid sequence that is at least 85%, at least 86%, at least 87%, at least 88%, at least 89%, at least 90%, at least 91%, at least 92%, at least 93%, at least 94%, at least 95%, at least 96%, at least 97%, at least 98%, or at least 99% identical to the nucleic acid sequence of SEQ ID NO: 2417. In another example, the recombinant nucleic acid comprises or consists of the nucleic acid sequence of SEQ ID NO: 2417.

[0427] In another example, the recombinant nucleic acid comprises or consists of a nucleic acid sequence that is at least 85%, at least 86%, at least 87%, at least 88%, at least 89%, at least 90%, at least 91%, at least 92%, at least 93%, at least 94%, at least 95%, at least 96%, at least 97%, at least 98%, or at least 99% identical to the nucleic acid sequence of SEQ ID NO: 2418. In another example, the recombinant nucleic acid comprises or consists of the nucleic acid sequence of SEQ ID NO: 2418.

[0428] In another example, the recombinant nucleic acid comprises or consists of a nucleic acid sequence that is at least 85%, at least 86%, at least 87%, at least 88%, at least 89%, at least 90%, at least 91%, at least 92%, at least 93%, at least 94%, at least 95%, at least 96%, at least 97%, at least 98%, or at least 99% identical to the nucleic acid sequence of SEQ ID NO: 2419. In another example, the recombinant nucleic acid comprises or consists of the nucleic acid sequence of SEQ ID NO: 2419.

[0429] In another example, the recombinant nucleic acid comprises or consists of a nucleic acid sequence that is at least 85%, at least 86%, at least 87%, at least 88%, at least 89%, at least 90%, at least 91%, at least 92%, at least 93%, at least 94%, at least 95%, at least 96%, at least 97%, at least 98%, or at least 99% identical to the nucleic acid sequence of SEQ ID NO: 2420. In another example, the recombinant nucleic acid comprises or consists of the nucleic acid sequence of SEQ ID NO: 2420.

[0430] In another example, the recombinant nucleic acid comprises or consists of a nucleic acid sequence that is at least 85%, at least 86%, at least 87%, at least 88%, at least 89%, at least 90%, at least 91%, at least 92%, at least 93%, at least 94%, at least 95%, at least 96%, at least 97%, at least 98%, or at least 99% identical to the nucleic acid sequence of SEQ ID NO: 2421. In another example, the recombinant nucleic acid comprises or consists of the nucleic acid sequence of SEQ ID NO: 2421.

[0431] In another example, the recombinant nucleic acid comprises or consists of a nucleic acid sequence that is at least 85%, at least 86%, at least 87%, at least 88%, at least 89%, at least 90%, at least 91%, at least 92%, at least 93%, at least 94%, at least 95%, at least 96%, at least 97%, at least 98%, or at least 99% identical to the nucleic acid sequence of SEQ ID NO: 2422. In another example, the recombinant nucleic acid comprises or consists of the nucleic acid sequence of SEQ ID NO: 2422.

[0432] In another example, the recombinant nucleic acid comprises or consists of a nucleic acid sequence that is at least 85%, at least 86%, at least 87%, at least 88%, at least 89%, at least 90%, at least 91%, at least 92%, at least 93%, at least 94%, at least 95%, at least 96%, at least 97%, at least 98%, or at least 99% identical to the nucleic acid sequence of SEQ ID NO: 2423. In another example, the recombinant nucleic acid comprises or consists of the nucleic acid sequence of SEQ ID NO: 2423.

[0433] In another example, the recombinant nucleic acid comprises or consists of a nucleic acid sequence that is at least 85%, at least 86%, at least 87%, at least 88%, at least 89%, at least 90%, at least 91%, at least 92%, at least 93%, at least 94%, at least 95%, at least 96%, at least 97%, at least 98%, or at least 99% identical to the nucleic acid sequence of SEQ ID NO: 2424. In another example, the recombinant nucleic acid comprises or consists of the nucleic acid sequence of SEQ ID NO: 2424.

[0434] In another example, the recombinant nucleic acid comprises or consists of a nucleic acid sequence that is at least 85%, at least 86%, at least 87%, at least 88%, at least 89%, at least 90%, at least 91%, at least 92%, at least 93%, at least 94%, at least 95%, at least 96%, at least 97%, at least 98%, or at least 99% identical to the nucleic acid sequence of SEQ ID NO: 2425. In another example, the recombinant nucleic acid comprises or consists of the nucleic acid sequence of SEQ ID NO: 2425.

[0435] In another example, the recombinant nucleic acid comprises or consists of a nucleic acid sequence that is at least 85%, at least 86%, at least 87%, at least 88%, at least 89%, at least 90%, at least 91%, at least 92%, at least 93%, at least 94%, at least 95%, at least 96%, at least 97%, at least 98%, or at least 99% identical to the nucleic acid sequence of SEQ ID NO: 2426. In another example, the recombinant nucleic acid comprises or consists of the nucleic acid sequence of SEQ ID NO: 2426.

[0436] In another example, the recombinant nucleic acid comprises or consists of a nucleic acid sequence that is at least 85%, at least 86%, at least 87%, at least 88%, at least 89%, at least 90%, at least 91%, at least 92%, at least 93%, at least 94%, at least 95%, at least 96%, at least 97%, at least 98%, or at least 99% identical to the nucleic acid sequence of SEQ ID NO: 2427. In another example, the recombinant nucleic acid comprises or consists of the nucleic acid sequence of SEQ ID NO: 2427.

[0437] In another example, the recombinant nucleic acid comprises or consists of a nucleic acid sequence that is at least 85%, at least 86%, at least 87%, at least 88%, at least 89%, at least 90%, at least 91%, at least 92%, at least 93%, at least 94%, at least 95%, at least 96%, at least 97%, at least 98%, or at least 99% identical to the nucleic acid sequence of SEQ ID NO: 2428. In another example, the recombinant nucleic acid comprises or consists of the nucleic acid sequence of SEQ ID NO: 2428.

[0438] In another example, the recombinant nucleic acid comprises or consists of a nucleic acid sequence that is at least 85%, at least 86%, at least 87%, at least 88%, at least 89%, at least 90%, at least 91%, at least 92%, at least 93%, at least 94%, at least 95%, at least 96%, at least 97%, at least 98%, or at least 99% identical to the nucleic acid sequence of SEQ ID NO: 2429. In another example, the recombinant nucleic acid comprises or consists of the nucleic acid sequence of SEQ ID NO: 2429.

[0439] In another example, the recombinant nucleic acid comprises or consists of a nucleic acid sequence that is at least 85%, at least 86%, at least 87%, at least 88%, at least 89%, at least 90%, at least 91%, at least 92%, at least 93%, at least 94%, at least 95%, at least 96%, at least 97%, at least 98%, or at least 99% identical to the nucleic acid sequence of SEQ ID NO: 2430. In another example, the recombinant nucleic acid comprises or consists of the nucleic acid sequence of SEQ ID NO: 2430.

[0440] In another example, the recombinant nucleic acid comprises or consists of a nucleic acid sequence that is at least 85%, at least 86%, at least 87%, at least 88%, at least 89%, at least 90%, at least 91%, at least 92%, at least 93%, at least 94%, at least 95%, at least 96%, at least 97%, at least 98%, or at least 99% identical to the nucleic acid sequence of SEQ ID NO: 2431. In another example, the recombinant nucleic acid comprises or consists of the nucleic acid sequence of SEQ ID NO: 2431.

[0441] In another example, the recombinant nucleic acid comprises or consists of a nucleic acid sequence that is at least 85%, at least 86%, at least 87%, at least 88%, at least 89%, at least 90%, at least 91%, at least 92%, at least 93%, at least 94%, at least 95%, at least 96%, at least 97%, at least 98%, or at least 99% identical to the nucleic acid sequence of SEQ ID NO: 2432. In another example, the recombinant nucleic acid comprises or consists of the nucleic acid sequence of SEQ ID NO: 2432.

[0442] In another example, the recombinant nucleic acid comprises or consists of a nucleic acid sequence that is at least 85%, at least 86%, at least 87%, at least 88%, at least 89%, at least 90%, at least 91%, at least 92%, at least 93%, at least 94%, at least 95%, at least 96%, at least 97%, at least 98%, or at least 99% identical to the nucleic acid sequence of SEQ ID NO: 2433. In another example, the recombinant nucleic acid comprises or consists of the nucleic acid sequence of SEQ ID NO: 2433.

[0443] In another example, the recombinant nucleic acid comprises or consists of a nucleic acid sequence that is at least 85%, at least 86%, at least 87%, at least 88%, at least 89%, at least 90%, at least 91%, at least 92%, at least 93%, at least 94%, at least 95%, at least 96%, at least 97%, at least 98%, or at least 99% identical to the nucleic acid sequence of SEQ ID NO: 2434. In another example, the recombinant nucleic acid comprises or consists of the nucleic acid sequence of SEQ ID NO: 2434.

[0444] In another example, the recombinant nucleic acid comprises or consists of a nucleic acid sequence that is at least 85%, at least 86%, at least 87%, at least 88%, at least 89%, at least 90%, at least 91%, at least 92%, at least 93%, at least 94%, at least 95%, at least 96%, at least 97%, at least 98%, or at least 99% identical to the nucleic acid sequence of SEQ ID NO: 2435. In another example, the recombinant nucleic acid comprises or consists of the nucleic acid sequence of SEQ ID NO: 2435.

[0445] In another example, the recombinant nucleic acid comprises or consists of a nucleic acid sequence that is at least 85%, at least 86%, at least 87%, at least 88%, at least 89%, at least 90%, at least 91%, at least 92%, at least 93%, at least 94%, at least 95%, at least 96%, at least 97%, at least 98%, or at least 99% identical to the nucleic acid sequence of SEQ ID NO: 2436. In another example, the recombinant nucleic acid comprises or consists of the nucleic acid sequence of SEQ ID NO: 2436.

[0446] In another example, the recombinant nucleic acid comprises or consists of a nucleic acid sequence that is at least 85%, at least 86%, at least 87%, at least 88%, at least 89%, at least 90%, at least 91%, at least 92%, at least 93%, at least 94%, at least 95%, at least 96%, at least 97%, at least 98%, or at least 99% identical to the nucleic acid sequence of SEQ ID NO: 2437. In another example, the recombinant nucleic acid comprises or consists of the nucleic acid sequence of SEQ ID NO: 2437.

[0447] In another example, the recombinant nucleic acid comprises or consists of a nucleic acid sequence that is at least 85%, at least 86%, at least 87%, at least 88%, at least 89%, at least 90%, at least 91%, at least 92%, at least 93%, at least 94%, at least 95%, at least 96%, at least 97%, at least 98%, or at least 99% identical to the nucleic acid sequence of SEQ ID NO: 2438. In another example, the recombinant nucleic acid comprises or consists of the nucleic acid sequence of SEQ ID NO: 2438.

### II. Recombinant Expression Vectors

[0448] Any of the recombinant nucleic acids described herein can be delivered to a cell (e.g., a muscle cell), a tissue (e.g., muscle tissue), or subject (e.g., human subject) without or with the use of a delivery system (e.g., recombinant expression vector (e.g., viral vector (e.g., AAV (e.g., rAAV))).

### (a) Recombinant Expression Vectors

[0449] Any of the recombinant nucleic acids described herein can be included in a recombinant expression vector (e.g., a viral vector (e.g., an AAV vector (e.g., arAAV vector))). Recombinant expression vectors can be delivered into a cell, a tissue, or a subject using any method known in the art or described herein. A recombinant expression vector can be an organic or inorganic molecule. A recombinant expression vector can be a small molecule (i.e., <5 kD) or a macromolecule (i.e., >5 kD). The recombinant expression vector can comprise DNA, RNA, or both DNA and RNA. The recombinant expression vector can be a DNA vector, a circular vector, or a plasmid. The recombinant expression vector can be double stranded or single stranded.

[0450] In some embodiments, a recombinant expression vector (e.g., a viral vector (e.g., an AAV (e.g., a rAAV))) disclosed herein can exhibit higher expression of the recombinant nucleic acid (e.g., expression of microdystrophin) in a specific tissue type (e.g., muscle) as compared to the expression of the same vector in a different tissue type (e.g., liver). For example, the recombinant expression vector can exhibit higher expression of microdystrophin in a skeletal muscle tissue or cell as compared to the expression of the same vector in a non-skeletal muscle tissue (e.g., heart, liver) or cell (e.g., heart cell, liver cell). In some embodiments, the vector exhibits at least about 1.2 fold, at least about 1.5 fold, at least about 1.75 fold, at least about 2 fold, at least about 2.5 fold, at least about 3 fold, at least about 4 fold higher expression of the recombinant nucleic acid (e.g., expression of microdystrophin) in a skeletal muscle tissue or cell as compared to the expression of the same vector in a non-skeletal muscle tissue (e.g., heart, liver) or cell (e.g., heart cell, liver cell).

[0451] In some embodiments, the recombinant expression vector is a viral vector. Non-limiting examples of viral vectors for use in compositions and methods described herein include retroviral vectors, adenoviral vectors, lentiviral vectors, adeno-associated viral (AAVs) vectors, herpes simplex viral (HSV) vectors, alphaviral vectors, pox viral vectors, murine leukemia viral vectors, and hybrid viral vectors.

### (b) Adeno Associated Virus Vectors

[0452] AAVs are particularly appropriate viral vectors for delivery of genetic material into mammalian cells. AAVs are not known to cause disease in mammals and cause a very mild immune response. Additionally, AAVs are able to infect cells in multiple stages whether at rest or in a phase of the cell replication cycle. Advantageously, AAV DNA is not regularly inserted into the host's genome at random sites, reducing the oncogenic properties of this vector.

[0453] AAVs have been engineered to deliver a variety of treatments, especially for genetic disorders caused by single nucleotide polymorphisms (“SNP”). Genetic diseases that have been studied in conjunction with AAV vectors include Cystic fibrosis, hemophilia, arthritis, macular degeneration, muscular dystrophy, Parkinson's disease, congestive heart failure, and Alzheimer's disease. The AAV can be used as a vector to deliver engineered nucleic acid to a host and utilize the host's own ribosomes to transcribe that nucleic acid into the desired proteins. See, e.g., West et al., Virology 160:38-47 (1987); U.S. Pat. No. 4,797,368; WO 93/24641; Kotin, Human Gene Therapy 5:793-801 (1994); and Muzyczka, J. Clin. Invest. 94:1351 (1994). AAVs have some deficiency in their replication and/or pathogenicity and thus can be safer that adenoviral vectors. In some embodiments, the AAV can integrate into a specific site on chromosome 19 of a human cell with no observable side effects. In some embodiments, the capacity of the AAV vector, system thereof, and/or AAV particles can be up to about 4.7 kb. The AAV vector or system thereof can include one or more engineered capsid polynucleotides described herein.

[0454] AAVs are small, replication-defective, nonenveloped viruses that infect humans and other primate species and have a linear single-stranded DNA genome. Naturally occurring AAV serotypes exhibit liver tropism. As a result, transfection of non-liver tissue with traditional AAV vectors is impeded by the virus's natural liver tropism. Moreover, because the liver acts to break down substances delivered to a subject, transfection of non-liver tissue with unmodified AAV vectors requires higher dosing to provide sufficient viral load to overcome the liver and reach non-liver tissue. More than 30 naturally occurring serotypes of AAV are available. Many natural variants in the AAV capsid exist. AAV serotypes include, but are not limited to, AAV serotypes AAV1, AAV2, AAV3, AAV3B, AAV4, AAV5, AAV6, AAV7, AAV8, AAV9, AAV10, AAV11, AAV12, AAV13. AAVs may be engineered using conventional molecular biology techniques, making it possible to optimize these particles, for example, for cell specific delivery, for minimizing immunogenicity, for tuning stability and particle lifetime, for efficient degradation, for accurate delivery to the nucleus. AAV vectors can be specifically targeted to one or more types of cells by choosing the appropriate combination of AAV serotype, promoter, and delivery method.

[0455] Previous approaches to identify AAV sequences correlated with tropism have relied upon the comparison of highly related extant serotypes with distinct characteristics, random domain swaps between unrelated serotypes, or consideration of higher-order structure, to identify motifs that define liver tropism. For example, mapping determinants of AAV tropism have been carried out by comparing highly related serotypes. One such example is the single-amino acid change (E531K) between AAV1 and AAV6 that improves murine liver transduction in AAV1. See, e.g., Wu et al. (2006) J. Virol., 80 (22): 11393-7, incorporated by reference herein. Another example is a reciprocal domain swap between AAV2 and AAV8 that alters tropism, but fails to define any robust specific tissue-targeting motifs. See, e.g., Raupp et al. (201) J. Virol., 86 (17): 9396-408, incorporated by reference herein. Further, global consideration of structure has only highlighted gross differences between better- or worse-liver-transducers that are more observational than useful in practice. Nam et al (2007) J. Virol., 81 (22): 12260-71.

[0456] AAVs exhibiting modified tissue tropism that may be used with the present invention are described in U.S. Pat. Nos. 9,695,220, 9,719,070; 10,119,125; 10,526,584; U.S. Patent Application Publication No. 2018-0369414; U.S. Patent Application Publication No. 2020-0123504; U.S. Patent Application Publication No. 2020-0318082; PCT International Patent Application Publication No. WO 2015/054653; PCT International Patent Application Publication No. WO 2016/179496; PCT International Patent Application Publication No. WO 2017/100791; and PCT International Patent Application Publication No. WO 2019/217911, the entirety of the contents of each of which are incorporated by reference herein.

[0457] The AAV vector or system thereof may include one or more regulatory molecules, such as promoters, enhancers, repressors and the like. In some embodiments, the AAV vector or system thereof can include one or more polynucleotides that can encode one or more regulatory proteins. In some embodiments, the one or more regulatory proteins can be selected from Rep78, Rep68, Rep52, Rep40, variants thereof, and combinations thereof. In some embodiments, the muscle specific promoter can drive expression of an engineered AAV capsid polynucleotide.

[0458] The AAV vector or system thereof can include one or more polynucleotides that can encode one or more capsid proteins, such as the engineered AAV capsid proteins described elsewhere herein. The engineered capsid proteins can be capable of assembling into a protein shell (an engineered capsid) of the AAV virus particle. The engineered capsid can have a cell-, tissue-, and/or organ-specific tropism.

[0459] The AAV vector or system thereof can be configured to produce AAV particles having a specific serotype. In some embodiments, the serotype can be AAV1, AAV2, AAV3, AAV4, AAV5, AAV6, AAV7, AAV8, AAV9 or any combinations thereof. In some embodiments, the AAV can be AAV1, AAV2, AAV5, AAV9 or any combination thereof. One can select the AAV of the AAV with regard to the cells to be targeted; e.g., one can select AAV serotypes 1, 2, 5, 9 or a hybrid capsid AAV1, AAV2, AAV5, AAV9 or any combination thereof for targeting brain and/or neuronal cells; and one can select AAV4 for targeting cardiac tissue; and one can select AAV8 for delivery to the liver. Thus, in some embodiments, an AAV vector or system thereof capable of producing AAV particles capable of targeting the brain and/or neuronal cells can be configured to generate AAV particles having serotypes 1, 2, 5 or a hybrid capsid AAV1, AAV2, AAV5 or any combination thereof. In some embodiments, an AAV vector or system thereof capable of producing AAV particles capable of targeting cardiac tissue can be configured to generate an AAV particle having an AAV4 serotype. In some embodiments, an AAV vector or system thereof capable of producing AAV particles capable of targeting the liver can be configured to generate an AAV having an AAV8 serotype. See also Srivastava. 2017. Curr. Opin. Virol. 21:75-80.

[0460] It will be appreciated that while the different serotypes can provide some level of cell, tissue, and/or organ specificity, each serotype still is multi-tropic and thus can result in tissue-toxicity if using that serotype to target a tissue that the serotype is less efficient in transducing. Thus, in addition to achieving some tissue targeting capacity via selecting an AAV of a particular serotype, it will be appreciated that the tropism of the AAV serotype can be modified by an engineered AAV capsid described herein. As described elsewhere herein, variants of wild type AAV of any serotype can be generated via a method described herein and determined to have a particular cell-specific tropism, which can be the same or different as that of the reference wild type AAV serotype. In some embodiments, the cell, tissue, and/or specificity of the wild type serotype can be enhanced (e.g., made more selective or specific for a particular cell type that the serotype is already biased towards). For example, wild type AAV9 is biased towards muscle and brain in humans (see, e.g., Srivastava. 2017. Curr. Opin. Virol. 21:75-80.) By including an engineered AAV capsid and/or capsid protein variant of wild type AAV9 as described herein, the tropism for nervous cells might be reduced or eliminated and/or the muscle specificity increased such that the nervous specificity appears reduced in comparison, thus enhancing the specificity for muscle as compared to the wild type AAV9. As previously mentioned, inclusion of an engineered capsid and/or capsid protein variant of a wild type AAV serotype can have a different tropism than the wild type reference AAV serotype. For example, an engineered AAV capsid and/or capsid protein variant of AAV9 can have specificity for a tissue other than muscle or brain in humans.

[0461] In some embodiments, the AAV vector is a hybrid AAV vector or system thereof. Hybrid AAVs are AAVs that include genomes with elements from one serotype that are packaged into a capsid derived from at least one different serotype. For example, if it is the rAAV2/5 that is to be produced, and if the production method is based on the helper-free, transient transfection method discussed above, the 1st plasmid and the 3rd plasmid (the adeno helper plasmid) will be the same as discussed for rAAV2 production. However, the 2nd plasmid, the pRepCap will be different. In this plasmid, called pRep2/Cap5, the Rep gene is still derived from AAV2, while the Cap gene is derived from AAV5. The production scheme is the same as the above-mentioned approach for AAV2 production. The resulting rAAV is called rAAV2/5, in which the genome is based on recombinant AAV2, while the capsid is based on AAV5. It is assumed the cell or tissue-tropism displayed by this AAV2/5 hybrid virus should be the same as that of AAV5. It will be appreciated that wild type hybrid AAV particles suffer the same specificity issues as with the non-hybrid wild type serotypes previously discussed.

[0462] Advantages achieved by the wild type based hybrid AAV systems can be combined with the increased and customizable cell-specificity that can be achieved with the engineered AAV capsids can be combined by generating a hybrid AAV that can include an engineered AAV capsid described elsewhere herein. It will be appreciated that hybrid AAVs can contain an engineered AAV capsid containing a genome with elements from a different serotype than the reference wild type serotype that the engineered AAV capsid is a variant of. For example, a hybrid AAV can be produced that includes an engineered AAV capsid that is a variant of an AAV9 serotype that is used to package a genome that contains components (e.g., rep elements) from an AAV2 serotype. As with wild type based hybrid AAVs previously discussed, the tropism of the resulting AAV particle will be that of the engineered AAV capsid.

[0463] In some embodiments, the AAV vector or system thereof is configured as a “gutless” vector, similar to that described in connection with a retroviral vector. In some embodiments, the “gutless” AAV vector or system thereof can have the cis-acting viral DNA elements involved in genome amplification and packaging in linkage with the heterologous sequences of interest (e.g., the engineered AAV capsid polynucleotide(s)).

[0464] The vectors described herein can be constructed using any suitable process or technique. In some embodiments, one or more suitable recombination and/or cloning methods or techniques can be used to the vector(s) described herein. Suitable recombination and/or cloning techniques and/or methods can include, but not limited to, those described in U.S. Application publication No. US 2004-0171156 A1. Other suitable methods and techniques are described elsewhere herein.

[0465] Construction of recombinant AAV vectors are described in a number of publications, including U.S. Pat. No. 5,173,414; Tratschin et al., Mol. Cell. Biol. 5:3251-3260 (1985); Tratschin, et al., Mol. Cell. Biol. 4:2072-2081 (1984); Hermonat & Muzyczka, PNAS 81:6466-6470 (1984); and Samulski et al., J. Virol. 63:03822-3828 (1989). Any of the techniques and/or methods can be used and/or adapted for constructing an AAV or other vector described herein. AAV vectors are discussed elsewhere herein.

[0466] In some embodiments, the vector can have one or more insertion sites, such as a restriction endonuclease recognition sequence (also referred to as a “cloning site”). In some embodiments, one or more insertion sites (e.g., about or more than about 1, 2, 3, 4, 5, 6, 7, 8, 9, 10, or more insertion sites) are located upstream and/or downstream of one or more sequence elements of one or more vectors.

[0467] Delivery vehicles, vectors, particles, nanoparticles, formulations and components thereof for expression of one or more elements of a engineered AAV capsid system described herein are as used in the foregoing documents, such as International Patent Application Publications WO WO 2021/050974 and WO 2021/077000 and PCT International Application No. WO 2022/020616, the contents of which are incorporated by reference herein.

[0468] Additional AAV vectors are described in International Patent Application Publication WO 2019/2071632, the contents of which are incorporated by reference herein.

[0469] Further AAV vectors are described in International Patent Application Publications WO 2020/086881 and WO 2020/235543, the contents of each of which are incorporated by reference herein.

[0470] Further AAV vectors are described in International Patent Application Publications WO 2005/033321; WO 2006/110689; WO 2007/127264; WO 2008/027084; WO 2009/073103; WO 2009/073104; WO 2009/105084; WO 2009/134681; WO 2009/136977; WO 2010/051367; WO 2010/138675; WO 2001/038187; WO 2012/112832; WO 2015/054653; WO 2016/179496; WO 2017/100791; WO 2017/019994; WO 2018/209154; WO 2019/067982; WO 2019/195701; WO 2019/217911; WO 2020/041498; WO 2020/210839; U.S. Pat. Nos. 7,906,111; 9,737,618; 10,265,417; 10,485,883; 10,695,441; 10,722,598; 8,999,678; 10,301,648; 10,626,415; 9,198,984; 10,155,931; 8,524,219; 9,206,238; 8,685,387; 9,359,618; 8,231,880; 8,470,310; 9,597,363; 8,940,290; 9,593,346; 10,501,757; 10,786,568; 10,973,928; 10,519,198; 8,846,031; 9,617,561; 9,884,071; 10,406,173; 9,596,220; 9,719,010; 10,117,125; 10,526,584; 10,881,548; 10,738,087; U.S. Patent Publication No. 2011-023353; U.S. Patent Publication No. 2019-0015527; U.S. Patent Publication No. 2020-155704; U.S. Patent Publication No 2017-0191079; U.S. Patent Publication No. 2019-0218574; U.S. Patent Publication No. 2020-0208176; U.S. Patent Publication No. 2020-0325491; U.S. Patent Publication No. 2019-0055523; U.S. Patent Publication No. 2020-0385689; U.S. Patent Publication No. 2009-0317417; U.S. Patent Publication No. 2016-0051603; U.S. Patent Publication No. 2016-00244783; U.S. Patent Publication No. 2017-0183636; U.S. Patent Publication No. 2020-0263201; U.S. Patent Publication No. 2020-0101099; U.S. Patent Publication No. 2020-0318082; U.S. Patent Publication No. 2018-0369414; U.S. Patent Publication No. 2019-0330278; U.S. Patent Publication No. 2020-0231986, the contents of each of which are incorporated by reference herein.

### III. Viral Particles and Capsid Proteins

[0471] Any of the recombinant nucleic acids or recombinant expression vectors (e.g., recombinant expression vector (e.g., viral vector (e.g., AAV (e.g., rAAV))) described herein can be packaged or encapsulated in a viral particle (e.g., AAV particle). Viral particles for use in compositions and methods described herein can include any viral capsid protein (e.g., AAV capsid protein or variant thereof) known in the art or described herein.

[0472] In some embodiments, a viral particle (e.g., an AAV particle (e.g., arAAV particle)) disclosed herein can exhibit higher expression of the recombinant nucleic acid (e.g., expression of microdystrophin) in a specific tissue type as compared to the expression of the same viral particle in a different tissue type. For example, the viral particle can exhibit higher expression of microdystrophin in a skeletal muscle tissue or cell as compared to the expression of the same viral particle in a non-skeletal muscle tissue (e.g., heart, liver) or cell (e.g., heart cell, liver cell). In some embodiments, the viral particle exhibits at least about 1.2 fold, at least about 1.5 fold, at least about 1.75 fold, at least about 2 fold, at least about 2.5 fold, at least about 3 fold, at least about 4 fold higher expression of the recombinant nucleic acid (e.g., expression of microdystrophin) in a skeletal muscle tissue or cell as compared to the expression of the same viral vector in a non-skeletal muscle tissue (e.g., heart, liver) or cell (e.g., heart cell, liver cell).

[0473] Viral particles described herein can include any virus suitable for delivery of a transgene, e.g., retroviruses, adenovirus, lentivirus, AAV, and murine leukemia viruses. In some embodiments, the viral particle is a recombinant adenovirus comprising a recombinant nucleic acid or a recombinant expression vector described herein. In some embodiments, the viral particle is a recombinant AAV comprising a recombinant nucleic acid or a recombinant AAV vector described herein. The AAV particle can be a scAAV or a ssAVV.

[0474] AAV particles described herein can include one or more AAV capsid proteins. In some embodiments, the one or more AAV capsid proteins can be from one or more AAV serotypes. Non-limiting examples of AAV serotypes include AAV1, AAV2, AAV3, AAV4, AAV5, AAV6, AAV7, AAV8, AAV9, AAV10, AAV11, AAV12, AAVrh8, AAVfh10, AAV-DJ, AAV-DJ/8, AAV-PHP.B, AAV-PHP.B2, AAV-PHP.B3, AAV-PHP.A, AAV-PHP.eB, AAV-PHP.S, and functional variants of any AAV serotypes.

[0475] In some embodiments, the AAV particle comprises a capsid protein comprising an amino acid sequence of formula (I) X₁NX₂X₃X₄RGDRX₅X₆L (SEQ ID NO: 1), wherein each of X₁-X₆ is any amino acid. In some embodiments, X₁ is A, I, F, G, H, L, M, Q, S, T, or V. In some embodiments, X₂ is A, G, S, T, or Y. In some embodiments, X₃ is S, N, G, or P. In some embodiments, X₄ is A, G, H, I, M, S, T, or V. In some embodiments, X₅ is A, G, or Q. In some embodiments, X₆ is A, I, L, M, N, S, or Y.

[0476] The amino acid sequence of formula (I) can be in a hypervariable region IV (HVR IV) relative to a wild type AAV9 capsid. For example, relative to a wild type AAV9 capsid, X₁ is a substitution at amino acid 451, X₂ is a substitution at amino acid 453, X₃ is a substitution at amino acid 454, X₄ is a substitution at amino acid 455, and RGDRX₅X₆L (SEQ ID NO: 2441) is inserted after amino acid 455.

[0477] In some embodiments, the AAV particle comprises a capsid protein comprising an amino acid sequence of any one of SEQ ID NOs: 801-1599. In some embodiments, the AAV particle comprises a capsid protein comprising an amino acid sequence of any one of SEQ ID NOs: 1600-2398. In some embodiments, the AAV particle comprises or consists of a capsid protein comprising an amino acid sequence of any one of SEQ ID NOs: 2-800. In some embodiments, the AAV particle comprises a capsid protein comprising an amino acid sequence comprising or consisting of SEQ ID NOs: 191, 198, 199, 215, 256, 379, 544, 550, or 748. In some embodiments, the AAV particle comprises a capsid protein comprising an amino acid sequence comprising or consisting of SEQ ID NO: 191. In some embodiments, the AAV particle comprises a capsid protein comprising an amino acid sequence comprising or consisting of SEQ ID NO: 198. In some embodiments, the AAV particle comprises a capsid protein comprising an amino acid sequence comprising or consisting of SEQ ID NO: 199. In some embodiments, the AAV particle comprises a capsid protein comprising an amino acid sequence comprising or consisting of SEQ ID NO: 215. In some embodiments, the AAV particle comprises a capsid protein comprising an amino acid sequence comprising or consisting of SEQ ID NO: 256. In some embodiments, the AAV particle comprises a capsid protein comprising an amino acid sequence comprising or consisting of SEQ ID NO: 379. In some embodiments, the AAV particle comprises a capsid protein comprising an amino acid sequence comprising or consisting of SEQ ID NO: 544. In some embodiments, the AAV particle comprises a capsid protein comprising an amino acid sequence comprising or consisting of SEQ ID NO: 550. In some embodiments, the AAV particle comprises a capsid protein comprising an amino acid sequence comprising or consisting of SEQ ID NO: 748.

[0478] Any of the capsid proteins described herein can further include a deletion. For example, the capsid protein can further comprise a deletion of amino acid G267 relative to a wild type AAV9 vector.

[0479] The capsid protein is the shell or coating of the virus that enables its delivery into the host. Without the protein, the nucleic acids would be destroyed by the host without entering into the host cells and beginning transcription and translation. The capsid protein may be in the natural conformation of a naturally occurring AAV, or it may be modified.

[0480] In certain example embodiments, the AAV capsid protein is an engineered AAV capsid protein having reduced or eliminated uptake in a non-muscle cell as compared to a corresponding wild type AAV capsid polypeptide.

[0481] In some embodiments, the engineered AAV capsid encoding polynucleotide can be included in a polynucleotide that is configured to be an AAV genome donor in an AAV vector system that can be used to generate engineered AAV particles described elsewhere herein. In some embodiments, the engineered AAV capsid encoding polynucleotide can be operably coupled to a poly adenylation tail. In some embodiments, the poly adenylation tail can be an SV40 poly adenylation tail. In some embodiments, the AAV capsid encoding polynucleotide can be operably coupled to a promoter. In some embodiments, the promoter can be a tissue specific promoter. In some embodiments, the tissue specific promoter is specific for muscle (e.g., cardiac, skeletal, and/or smooth muscle), neurons and supporting cells (e.g., astrocytes, glial cells, Schwann cells, etc.), fat, spleen, liver, kidney, immune cells, spinal fluid cells, synovial fluid cells, skin cells, cartilage, tendons, connective tissue, bone, pancreas, adrenal gland, blood cell, bone marrow cells, placenta, endothelial cells, and combinations thereof. In some embodiments, the promoter can be a constitutive promoter. Suitable tissue specific promoters and constitutive promoters are discussed elsewhere herein and are generally known in the art and can be commercially available. Suitable muscle specific promoters include, but are not limited to CK8, MHCK7, Myoglobin promoter (Mb), Desmin promoter, muscle creatine kinase promoter (MCK) and variants thereof, and SPc5-12 synthetic promoter.

[0482] Described herein are various embodiments of engineered viral capsids, such as adeno-associated virus (AAV) capsids, that can be engineered to confer cell-specific tropism, such as muscle specific tropism, to an engineered viral particle. Engineered viral capsids can be lentiviral, retroviral, adenoviral, or AAV capsids. The engineered capsids can be included in an engineered virus particle (e.g., an engineered lentiviral, retroviral, adenoviral, or AAV virus particle), and can confer cell-specific tropism, reduced immunogenicity, or both to the engineered viral particle. The engineered viral capsids described herein can include one or more engineered viral capsid proteins described herein. The engineered viral capsids described herein can include one or more engineered viral capsid proteins described herein that can contain a muscle-specific targeting moiety containing or composed of an n-mer motif described elsewhere herein.

[0483] The engineered viral capsid and/or capsid proteins can be encoded by one or more engineered viral capsid polynucleotides. In some embodiments, the engineered viral capsid polynucleotide is an engineered AAV capsid polynucleotide, engineered lentiviral capsid polynucleotide, engineered retroviral capsid polynucleotide, or engineered adenovirus capsid polynucleotide. In some embodiments, an engineered viral capsid polynucleotide (e.g., an engineered AAV capsid polynucleotide, engineered lentiviral capsid polynucleotide, engineered retroviral capsid polynucleotide, or engineered adenovirus capsid polynucleotide) can include a 3′ polyadenylation signal. The polyadenylation signal can be an SV40 polyadenylation signal.

[0484] The engineered viral capsids can be variants of wild type viral capsid. For example, in some embodiments, the engineered AAV capsids can be variants of wild type AAV capsids. In some embodiments, the wild type AAV capsids can be composed of VP1, VP2, VP3 capsid proteins or a combination thereof. In other words, the engineered AAV capsids can include one or more variants of a wild type VP1, wild type VP2, and/or wild type VP3 capsid proteins. In some embodiments, the serotype of the reference wild type AAV capsid can be AAV1, AAV2, AAV3, AAV4, AAV5, AAV6, AAV8, AAV9 or any combination thereof. In some embodiments, the serotype of the wild type AAV capsid can be AAV9. The engineered AAV capsids can have a different tropism than that of the reference wild type AAV capsid.

[0485] The engineered viral capsid can contain 1-60 engineered capsid proteins. In some embodiments, the engineered viral capsids can contain 1, 2, 3, 4, 5, 6, 7, 8, 9, 10, 11, 12, 13, 14, 15, 16, 17, 18, 19, 20, 21, 22, 23, 24, 25, 26, 27, 28, 29, 30, 31, 32, 33, 34, 35, 36, 37, 38, 39, 40, 41, 42, 43, 44, 45, 46, 47, 48, 49, 50, 51, 52, 53, 54, 55, 56, 57, 58, 59, or 60 engineered capsid proteins. In some embodiments, the engineered viral capsid can contain 0-59 wild type viral capsid proteins. In some embodiments, the engineered viral capsid can contain 0, 1, 2, 3, 4, 5, 6, 7, 8, 9, 10, 11, 12, 13, 14, 15, 16, 17, 18, 19, 20, 21, 22, 23, 24, 25, 26, 27, 28, 29, 30, 31, 32, 33, 34, 35, 36, 37, 38, 39, 40, 41, 42, 43, 44, 45, 46, 47, 48, 49, 50, 51, 52, 53, 54, 55, 56, 57, 58, or 59 wild type viral capsid proteins.

[0486] In some embodiments, the engineered AAV capsid can contain 1-60 engineered capsid proteins. In some embodiments, the engineered AAV capsids can contain 1, 2, 3, 4, 5, 6, 7, 8, 9, 10, 11, 12, 13, 14, 15, 16, 17, 18, 19, 20, 21, 22, 23, 24, 25, 26, 27, 28, 29, 30, 31, 32, 33, 34, 35, 36, 37, 38, 39, 40, 41, 42, 43, 44, 45, 46, 47, 48, 49, 50, 51, 52, 53, 54, 55, 56, 57, 58, 59, or 60 engineered capsid proteins. In some embodiments, the engineered AAV capsid can contain 0-59 wild type AAV capsid proteins. In some embodiments, the engineered AAV capsid can contain 0, 1, 2, 3, 4, 5, 6, 7, 8, 9, 10, 11, 12, 13, 14, 15, 16, 17, 18, 19, 20, 21, 22, 23, 24, 25, 26, 27, 28, 29, 30, 31, 32, 33, 34, 35, 36, 37, 38, 39, 40, 41, 42, 43, 44, 45, 46, 47, 48, 49, 50, 51, 52, 53, 54, 55, 56, 57, 58, or 59 wild type AAV capsid proteins.

[0487] In some embodiments, the engineered viral capsid protein can have an n-mer amino acid motif, where n can be at least 3 amino acids. In some embodiments, n can be 3, 4, 5, 6, 7, 8, 9, 10, 11, 12, 13, 14, or 15 amino acids. In some embodiments, an engineered AAV capsid can have a 6-mer or 7-mer amino acid motif. In some embodiments, the n-mer amino acid motif can be inserted between two amino acids in the wild type viral protein (VP) (or capsid protein). In some embodiments, the n-mer motif can be inserted between two amino acids in a variable amino acid region in a viral capsid protein.

[0488] In some embodiments, the n-mer motif can be inserted between two amino acids in a variable amino acid region in an AAV capsid protein. The core of each wild type AAV viral protein contains an eight-stranded beta-barrel motif (betaB to betaI) and an alpha-helix (alphaA) that are conserved in autonomous parvovirus capsids (see, e.g., DiMattia et al. 2012. J. Virol. 86 (12): 6947-6958). Structural variable regions (VRs) occur in the surface loops that connect the beta-strands, which cluster to produce local variations in the capsid surface. AAVs have 12 variable regions (also referred to as hypervariable regions) (see, e.g., Weitzman and Linden. 2011. “Adeno-Associated Virus Biology.” In Snyder, R. O., Moullier, P. (eds.) Totowa, NJ: Humana Press). In some embodiments, one or more n-mer motifs can be inserted between two amino acids in one or more of the 12 variable regions in the wild type AVV capsid proteins. In some embodiments, the one or more n-mer motifs can be each be inserted between two amino acids in VR-I, VR-II, VR-III, VR-IV, VR-V, VR-VI, VR-VII, VR-III, VR-IX, VR-X, VR-XI, VR-XII, or a combination thereof. In some embodiments, the n-mer can be inserted between two amino acids in the VR-III of a capsid protein. In some embodiments, the engineered capsid can have an n-mer inserted between any two contiguous amino acids between amino acids 262 and 269, between any two contiguous amino acids between amino acids 327 and 332, between any two contiguous amino acids between amino acids 382 and 386, between any two contiguous amino acids between amino acids 452 and 460, between any two contiguous amino acids between amino acids 488 and 505, between any two contiguous amino acids between amino acids 545 and 558, between any two contiguous amino acids between amino acids 581 and 593, between any two contiguous amino acids between amino acids 704 and 714 of an AAV9 viral protein. In some embodiments, the engineered capsid can have an n-mer inserted between amino acids 588 and 589 of an AAV9 viral protein. In some embodiments, the engineered capsid can have a 7-mer motif inserted between amino acids 588 and 589 of an AAV9 viral protein. In other embodiments, the motif inserted is a 10-mer motif, with replacement of amino acids 586-88 and an insertion before 589. It will be appreciated that n-mers can be inserted in analogous positions in AAV viral proteins of other serotypes. In some embodiments as previously discussed, the n-mer(s) can be inserted between any two contiguous amino acids within the AAV viral protein and in some embodiments the insertion is made in a variable region.

[0489] In some embodiments, the first 1, 2, 3, or 4 amino acids of an n-mer motif can replace 1, 2, 3, or 4 amino acids of a polypeptide into which it is inserted and preceding the insertion site. In some embodiments, the amino acids of the n-mer motif that replace 1 or more amino acids of the polypeptide into which the n-mer motif is inserted come before or immediately before an “RGDG” (SEQ ID NO: 2440) in an n-mer motif. For example, in one or more of the 10-mer inserts, the first three amino acids shown can replace 1-3 amino acids into a polypeptide to which they may be inserted. Using an AAV as another non-limiting example, one or more of the n-mer motifs can be inserted into, e.g., and AAV9 capsid prolylpeptide between amino acids 588 and 589 and the insert can replace amino acids 586, 587, and 588 such that the amino acid immediately preceding the n-mer motif after insertion is residue 585. It will be appreciated that this principle can apply in any other insertion context and is not necessarily limited to insertion between residues 588 and 589 of an AAV9 capsid or equivalent position in another AAV capsid. It will further be appreciated that in some embodiments, no amino acids in the polypeptide into which the n-mer motif is inserted are replaced by the n-mer motif.

[0490] In some embodiments, the AAV capsids or other viral capsids or compositions can be muscle specific. In some embodiments, muscle-specificity of the engineered AAV or other viral capsid or other composition is conferred by a muscle specific n-mer motif incorporated in the engineered AAV or other viral capsid or other composition described herein. While not intending to be bound by theory, it is believed that the n-mer motif confers a 3D structure to or within a domain or region of the engineered AAV capsid or other viral capsid or other composition such that the interaction of the viral particle or other composition containing the engineered AAV capsid or other viral capsid or other composition described herein has increased or improved interactions (e.g., increased affinity) with a cell surface receptor and/or other molecule on the surface of a muscle cell. In some embodiments, the cell surface receptor is AAV receptor (AAVR). In some embodiments, the cell surface receptor is a muscle cell specific AAV receptor. In some embodiments, the cell surface receptor or other molecule is a cell surface receptor or other molecule selectively expressed on the surface of a muscle cell. In some embodiments, the cell surface receptor or molecule is an integrin or dimer thereof. In some embodiments, the cell surface receptor or molecule is an Vb6 integrin heterodimer.

[0491] In some embodiments, a muscle specific engineered viral particle or other composition described herein containing the muscle-specific capsid, n-mer motif, or muscle-specific targeting moiety described herein can have an increased uptake, delivery rate, transduction rate, efficiency, amount, or a combination thereof in a muscle cell as compared to other cells types and/or other virus particles (including but not limited to AAVs) and other compositions that do not contain the muscle-specific n-mer motif of the present invention.

### IV. Pharmaceutical Compositions

[0492] Any of the recombinant nucleic acids, the expression vectors (e.g., AAV vectors), or the AAV particles described herein can be included in a pharmaceutical composition comprising a pharmaceutically acceptable carrier.

[0493] Some embodiments of the invention may include any acceptable form of providing the AAV vector to a subject. For example, the AAV vector may be provided to the subject in the form of a composition or formulation comprising the AAV vector. The expression vector (e.g., AAV vector) of this invention can be formulated and administered to treat a variety of disease states by any means that produces contact of the active ingredient with the agent's site of action in the body of the subject. The compositions, polynucleotides, polypeptides, particles, cells, vector systems and combinations thereof described herein can be contained in a formulation, such as a pharmaceutical formulation. In some embodiments, the formulations can be used to generate polypeptides and other particles that include one or more muscle-specific targeting moieties described herein. In some embodiments, the formulations can be delivered to a subject in need thereof. In some embodiments, component(s) of the engineered AAV capsid system, engineered cells, engineered AAV capsid particles, and/or combinations thereof described herein can be included in a formulation that can be delivered to a subject or a cell. In some embodiments, the formulation is a pharmaceutical formulation. One or more of the polypeptides, polynucleotides, vectors, cells, and combinations thereof described herein can be provided to a subject in need thereof or a cell alone or as an active ingredient, such as in a pharmaceutical formulation. As such, also described herein are pharmaceutical formulations containing an amount of one or more of the polypeptides, polynucleotides, vectors, cells, or combinations thereof described herein. In some embodiments, the pharmaceutical formulation can contain an effective amount of the one or more of the polypeptides, polynucleotides, vectors, cells, and combinations thereof described herein. The pharmaceutical formulations described herein can be administered to a subject in need thereof or a cell.

[0494] In some embodiments, the amount of the one or more of the polypeptides, polynucleotides, vectors, cells, virus particles, nanoparticles, other delivery particles, and combinations thereof described herein contained in the pharmaceutical formulation can range from about 1 μg/kg to about 10 mg/kg based upon the bodyweight of the subject in need thereof or average bodyweight of the specific patient population to which the pharmaceutical formulation can be administered. The amount of the one or more of the polypeptides, polynucleotides, vectors, cells, and combinations thereof described herein in the pharmaceutical formulation can range from about 1 μg to about 10 g, from about 10 nL to about 10 ml. In embodiments where the pharmaceutical formulation contains one or more cells, the amount can range from about 1 cell to 1×10², 1×10³, 1×10⁴, 1×10⁵, 1×10⁶, 1×10⁷, 1×10⁸, 1×10⁹, 1×10¹⁰ or more cells. In embodiments where the pharmaceutical formulation contains one or more cells, the amount can range from about 1 cell to 1×10², 1×10³, 1×10⁴, 1×10⁵, 1×10⁶, 1×10⁷, 1×10⁸, 1×10⁹, 1×10¹⁰ or more cells per nL, μL, mL, or L.

[0495] In embodiments, when engineered AAV capsid particles are included in the formulation, the formulation can contain 1 to 1×10², 1×10³, 1×10⁴, 1×10⁵, 1×10⁶, 1×10⁷, 1×10⁸, 1×10⁹, 1×10¹⁰, 1×10¹¹, 1×10¹², 1×10¹³, 1×10¹⁴, 1×10¹⁵, 1×10¹⁶, 1×10¹⁷, 1×10¹⁸, 1×10¹⁹, or 1×10²⁰ transducing units (TU)/mL of the engineered AAV capsid particles. In some embodiments, the formulation can be 0.1 to 100 mL in volume and can contain 1 to 1×10², 1×10³, 1×10⁴, 1×10⁵, 1×10⁶, 1×10⁷, 1×10⁸, 1×10⁹, 1×10¹⁰, 1×10¹¹, 1×10¹², 1×10¹³, 1×10¹⁴, 1×10¹⁵, 1×10¹⁶, 1×10¹⁷, 1×10¹⁸, 1×10¹⁹, or 1×10²⁰ transducing units (TU)/mL of the engineered AAV capsid particles.

### (a) Pharmaceutically Acceptable Carriers and Auxiliary Ingredients and Agents

[0496] Any recombinant nucleic acids, expression vectors (e.g., AAV vectors), or AAV particles described herein can be included in a pharmaceutical composition comprising a pharmaceutically acceptable carrier.

[0497] In embodiments, the pharmaceutical formulation containing an amount of one or more of the polypeptides, polynucleotides, vectors, cells, virus particles, nanoparticles, other delivery particles, and combinations thereof described herein can further include a pharmaceutically acceptable carrier. Suitable pharmaceutically acceptable carriers include, but are not limited to, water, salt solutions, alcohols, gum arabic, vegetable oils, benzyl alcohols, polyethylene glycols, gelatin, carbohydrates such as lactose, amylose or starch, magnesium stearate, talc, silicic acid, viscous paraffin, perfume oil, fatty acid esters, hydroxy methylcellulose, and polyvinyl pyrrolidone, which do not deleteriously react with the active composition.

[0498] The pharmaceutical formulations can be sterilized, and if desired, mixed with auxiliary agents, such as lubricants, preservatives, stabilizers, wetting agents, emulsifiers, salts for influencing osmotic pressure, buffers, coloring, flavoring and/or aromatic substances, and the like which do not deleteriously react with the active composition.

[0499] In some embodiments, the pharmaceutical formulations described herein may be in a dosage form. The dosage forms can be adapted for administration by any appropriate route. Appropriate routes include, but are not limited to, oral (including buccal or sublingual), rectal, epidural, intracranial, intraocular, inhaled, intranasal, topical (including buccal, sublingual, or transdermal), vaginal, intraurethral, parenteral, intracranial, subcutaneous, intramuscular, intravenous, intraperitoneal, intradermal, intraosseous, intracardiac, intraarticular, intracavernous, intrathecal, intravitreal, intracerebral, gingival, subgingival, intracerebroventricular, and intradermal. Such formulations may be prepared by any method known in the art.

[0500] Dosage forms adapted for oral administration can be discrete dosage units such as capsules, pellets or tablets, powders or granules, solutions, or suspensions in aqueous or non-aqueous liquids; edible foams or whips, or in oil-in-water liquid emulsions or water-in-oil liquid emulsions. In some embodiments, the pharmaceutical formulations adapted for oral administration also include one or more agents which flavor, preserve, color, or help disperse the pharmaceutical formulation. Dosage forms prepared for oral administration can also be in the form of a liquid solution that can be delivered as foam, spray, or liquid solution. In some embodiments, the oral dosage form can contain about 1 ng to 1000 g of a pharmaceutical formulation containing a therapeutically effective amount or an appropriate fraction thereof of the targeted effector fusion protein and/or complex thereof or composition containing the one or more of the polypeptides, polynucleotides, vectors, cells, and combinations thereof described herein. The oral dosage form can be administered to a subject in need thereof.

[0501] Where appropriate, the dosage forms described herein can be microencapsulated.

[0502] The dosage form can also be prepared to prolong or sustain the release of any ingredient. In some embodiments, the one or more of the polypeptides, polynucleotides, vectors, cells, and combinations thereof described herein can be the ingredient whose release is delayed. In other embodiments, the release of an optionally included auxiliary ingredient is delayed. Suitable methods for delaying the release of an ingredient include, but are not limited to, coating or embedding the ingredients in material in polymers, wax, gels, and the like. Delayed release dosage formulations can be prepared as described in standard references such as “Pharmaceutical dosage form tablets,” eds. Liberman et. al. (New York, Marcel Dekker, Inc., 1989), “Remington—The science and practice of pharmacy”, 20th ed., Lippincott Williams & Wilkins, Baltimore, MD, 2000, and “Pharmaceutical dosage forms and drug delivery systems”, 6th Edition, Ansel et al., (Media, PA: Williams and Wilkins, 1995). These references provide information on excipients, materials, equipment, and processes for preparing tablets and capsules and delayed release dosage forms of tablets and pellets, capsules, and granules. The delayed release can be anywhere from about an hour to about 3 months or more.

[0503] Examples of suitable coating materials include, but are not limited to, cellulose polymers such as cellulose acetate phthalate, hydroxypropyl cellulose, hydroxypropyl methylcellulose, hydroxypropyl methylcellulose phthalate, and hydroxypropyl methylcellulose acetate succinate; polyvinyl acetate phthalate, acrylic acid polymers and copolymers, and methacrylic resins that are commercially available under the trade name EUDRAGIT® (Roth Pharma, Westerstadt, Germany), zein, shellac, and polysaccharides.

[0504] Coatings may be formed with a different ratio of water-soluble polymer, water insoluble polymers, and/or pH dependent polymers, with or without water insoluble/water soluble non-polymeric excipient, to produce the desired release profile. The coating is either performed on the dosage form (matrix or simple) which includes, but is not limited to, tablets (compressed with or without coated beads), capsules (with or without coated beads), beads, particle compositions, “ingredient as is” formulated as, but not limited to, suspension form or as a sprinkle dosage form.

[0505] Dosage forms adapted for topical administration can be formulated as ointments, creams, suspensions, lotions, powders, solutions, pastes, gels, sprays, aerosols, or oils. In some embodiments for treatments of the eye or other external tissues, for example the mouth or the skin, the pharmaceutical formulations are applied as a topical ointment or cream. When formulated in an ointment, the one or more of the polypeptides, polynucleotides, vectors, cells, and combinations thereof described herein can be formulated with a paraffinic or water-miscible ointment base. In some embodiments, the active ingredient can be formulated in a cream with an oil-in-water cream base or a water-in-oil base. Dosage forms adapted for topical administration in the mouth include lozenges, pastilles, and mouth washes.

[0506] Dosage forms adapted for nasal or inhalation administration include aerosols, solutions, suspension drops, gels, or dry powders. In some embodiments, the one or more of the polypeptides, polynucleotides, vectors, cells, and combinations thereof described herein is contained in a dosage form adapted for inhalation is in a particle-size-reduced form that is obtained or obtainable by micronization. In some embodiments, the particle size of the size reduced (e.g., micronized) compound or salt or solvate thereof, is defined by a D50 value of about 0.5 to about 10 microns as measured by an appropriate method known in the art. Dosage forms adapted for administration by inhalation also include particle dusts or mists. Suitable dosage forms wherein the carrier or excipient is a liquid for administration as a nasal spray or drops include aqueous or oil solutions/suspensions of an active ingredient (e.g., the one or more of the polypeptides, polynucleotides, vectors, cells, and combinations thereof described herein and/or auxiliary active agent), which may be generated by various types of metered dose pressurized aerosols, nebulizers, or insufflators.

[0507] In some embodiments, the dosage forms can be aerosol formulations suitable for administration by inhalation. In some of these embodiments, the aerosol formulation can contain a solution or fine suspension of the one or more of the polypeptides, polynucleotides, vectors, cells, and combinations thereof described herein and a pharmaceutically acceptable aqueous or non-aqueous solvent. Aerosol formulations can be presented in single or multi-dose quantities in sterile form in a sealed container. For some of these embodiments, the sealed container is a single dose or multi-dose nasal, or an aerosol dispenser fitted with a metering valve (e.g., metered dose inhaler), which is intended for disposal once the contents of the container have been exhausted.

[0508] Where the aerosol dosage form is contained in an aerosol dispenser, the dispenser contains a suitable propellant under pressure, such as compressed air, carbon dioxide, or an organic propellant, including but not limited to a hydrofluorocarbon. The aerosol formulation dosage forms in other embodiments are contained in a pump-atomizer. The pressurized aerosol formulation can also contain a solution or a suspension of one or more of the polypeptides, polynucleotides, vectors, cells, and combinations thereof described herein. In further embodiments, the aerosol formulation can also contain co-solvents and/or modifiers incorporated to improve, for example, the stability and/or taste and/or fine particle mass characteristics (amount and/or profile) of the formulation. Administration of the aerosol formulation can be once daily or several times daily, for example 2, 3, 4, or 8 times daily, in which 1, 2, or 3 doses are delivered each time.

[0509] For some dosage forms suitable and/or adapted for inhaled administration, the pharmaceutical formulation is a dry powder inhalable formulation. In addition to the one or more of the polypeptides, polynucleotides, vectors, cells, and combinations thereof described herein, an auxiliary active ingredient, and/or pharmaceutically acceptable salt thereof, such a dosage form can contain a powder base such as lactose, glucose, trehalose, mannitol, and/or starch. In some of these embodiments, the one or more of the polypeptides, polynucleotides, vectors, cells, and combinations thereof described herein is in a particle-size reduced form. In further embodiments, a performance modifier, such as L-leucine or another amino acid, cellobiose octaacetate, and/or metals salts of stearic acid, such as magnesium or calcium stearate.

[0510] In some embodiments, the aerosol dosage forms can be arranged so that each metered dose of aerosol contains a predetermined amount of an active ingredient, such as the one or more of the one or more of the polypeptides, polynucleotides, vectors, cells, and combinations thereof described herein.

[0511] Dosage forms adapted for vaginal administration can be presented as pessaries, tampons, creams, gels, pastes, foams, or spray formulations. Dosage forms adapted for rectal administration include suppositories or enemas.

[0512] Dosage forms adapted for parenteral administration and/or adapted for any type of injection (e.g., intravenous, intraperitoneal, subcutaneous, intramuscular, intradermal, intraosseous, epidural, intracardiac, intraarticular, intracavernous, gingival, subgingival, intrathecal, intravitreal, intracerebral, and intracerebroventricular) can include aqueous and/or non-aqueous sterile injection solutions, which can contain anti-oxidants, buffers, bacteriostats, solutes that render the composition isotonic with the blood of the subject, and aqueous and non-aqueous sterile suspensions, which can include suspending agents and thickening agents. The dosage forms adapted for parenteral administration can be presented in a single-unit dose or multi-unit dose containers, including but not limited to sealed ampoules or vials. The doses can be lyophilized and resuspended in a sterile carrier to reconstitute the dose prior to administration. Extemporaneous injection solutions and suspensions can be prepared in some embodiments, from sterile powders, granules, and tablets.

[0513] Dosage forms adapted for ocular administration can include aqueous and/or nonaqueous sterile solutions that can optionally be adapted for injection, and which can optionally contain antioxidants, buffers, bacteriostats, solutes that render the composition isotonic with the eye or fluid contained therein or around the eye of the subject, and aqueous and nonaqueous sterile suspensions, which can include suspending agents and thickening agents.

[0514] For some embodiments, the dosage form contains a predetermined amount of the one or more of the polypeptides, polynucleotides, vectors, cells, and combinations thereof described herein per unit dose. In some embodiments, the predetermined amount of the Such unit doses may therefore be administered once or more than once a day. Such pharmaceutical formulations may be prepared by any of the methods well known in the art.

### V. Methods of Treatment and Use

[0515] Aspects of the present disclosure provide methods for treating DMD in a subject in need thereof using any of the recombinant nucleic acids, the expression vectors (e.g., the AAV vectors), the AAV particles, or pharmaceutical compositions thereof described herein.

### (a) Subjects

[0516] A subject can be any subject for whom diagnosis, treatment, or therapy is desired. A subject can be a human or a non-human primate. A subject can be any age. In some embodiments, the subject is a human subject that is any age (e.g., a human subject that is between the ages of 2 and 5).

[0517] A subject (e.g., human subject) to be treated by the methods described herein can be a subject having, suspected of having, or at risk for having DMD. A subject (e.g., human subject) suspected of having DMD might show one or more symptoms of DMD, e.g., muscle weakness, muscle wasting, muscle pain, enlarged muscles, walking abnormalities, or difficulty breathing. A subject (e.g., human subject) at risk for DMD can be a subject having one or more risk factors for DMD, e.g., one or more mutations in a dystrophin gene. A subject (e.g., human subject) who needs the treatment described herein can be identified by routine medical examination, e.g., laboratory tests (e.g., serum creatine kinase (CK) blood tests), genetic testing (e.g., testing for one or more mutations in a dystrophin gene), or muscle biopsy.

[0518] Any of the methods described herein can further comprise a step of identifying a subject (e.g., a human subject) for treatment based on identifying one or more mutations in a dystrophin gene. In some embodiments, presence of one or more mutations in a dystrophin gene is determined in a biological sample (e.g., a blood sample) obtained from a subject (e.g., a human subject).

### (b) Administration

[0519] Methods described herein encompass administering an effective amount of a recombinant nucleic acid, an expression vector (e.g., an AAV vector), an AAV particle, or a pharmaceutical composition thereof to a subject, e.g., a subject in need thereof, for example, a human subject, by a variety of methods. The route of administration can be intramuscular administration, subcutaneous injection, intravenous injection, or intravenous (IV) administration.

[0520] An effective amount refers to the amount of a recombinant nucleic acid, an expression vector (e.g., an AAV vector), an AAV particle, or a pharmaceutical composition thereof needed to prevent or alleviate at least one or more signs or symptoms of DMD, and relates to a sufficient amount of a recombinant nucleic acid, an expression vector (e.g., an AAV vector), an AAV particle, or pharmaceutical compositions thereof that provides the desired effect, e.g., to treat a subject (e.g., human subject) having DMD. An effective amount also can include an amount sufficient to prevent or delay the development of a symptom of DMD, alter the course of a symptom of DMD (e.g., slow the progression of a symptom of DMD), or reverse a symptom of DMD.

[0521] Methods described herein comprise administering (e.g., intramuscularly or intravenously) to a subject (e.g., a human subject) a recombinant nucleic acid, an expression vector (e.g., an AAV vector), an AAV particle, or a pharmaceutical composition described herein one or more times. In some embodiments, an effective amount of a recombinant nucleic acid, an expression vector (e.g., an AAV vector), an AAV particle, or a pharmaceutical composition thereof is administered to a subject (e.g., a human subject) no more than once or more than once (e.g., administered twice, administered three times, or administered four times).

[0522] Any of the methods for treating DMD described herein can be used in combination therapies. For example, any of the methods for treating DMD described herein can be co-used with other therapeutic agents for treating DMD, or for enhancing efficacy of the compositions described herein (e.g., the recombinant nucleic acids, the expression vectors (e.g., the AAV vectors), or pharmaceutical compositions) and/or reducing side effects of the compositions described herein (e.g., the recombinant nucleic acids, the expression vectors (e.g., the AAV vectors), or pharmaceutical compositions).

[0523] Any of the recombinant nucleic acids, the expression vectors (e.g., the AAV vectors), or pharmaceutical compositions described herein can be used as a medicament or in the manufacture of a medicament for the treatment of DMD, or ameliorating one or more symptoms thereof in a subject.

### VI. Kits for Therapeutic Use

[0524] The present disclosure provides kits for treating DMD. Such kits can include any of the recombinant nucleic acids, AAV vectors, AAV particles, or pharmaceutical compositions thereof described herein. In some embodiments, the kit can additionally comprise instructions for practicing any of the methods described herein. The instructions may include information as to dosage, dosing schedule, and route of administration. Instructions supplied in the kits of the disclosure can be written instructions on a label or a package insert.

### OTHER EMBODIMENTS

[0525] Without further elaboration, it is believed that one skilled in the art can, based on the above description, utilize the present disclosure to its fullest extent. The specific embodiments herein are to be construed as merely illustrative, and not limitative of the remainder of the disclosure in any way whatsoever. The recitation of a listing of elements in any definition of a variable herein includes definitions of that variable as any single element or combination (or sub-combination) of listed elements. The recitation of an embodiment herein includes that embodiment as any single embodiment or in combination with any other embodiments or portions thereof.

[0526] In any of the aspects and embodiments described herein, the nucleic acid sequences contemplated can be DNA, RNA, or modified versions thereof. Modified nucleic acids can be distinguished from naturally occurring nucleic acids by modifications to the backbone of the polynucleotide chain, for example, peptide nucleic acids (PNA), morpholinos, locked nucleic acids (LNA), glycol nucleic acids (GNA) and threose nucleic acid (TNA). Modified nucleic acids can also include analogs with modifications to the four nucleobases. In some embodiments, the nucleic acids are PNAs. In some embodiments, the nucleic acids are LNAs. In some embodiments, the nucleic acids are morpholinos. In some embodiments, the nucleic acids are in a single-stranded form. In some embodiments, the nucleic acids are in double-stranded form. In some embodiments, the nucleic acids are linear. In some embodiments, the nucleic acids are circular. In some embodiments, the nucleic acids are plasmids.

[0527] Non-limiting embodiments of the present disclosure include:

[0528] Embodiment 1 is a composition comprising an adeno-associated virus (AAV) particle comprising an engineered capsid protein comprising the amino acid sequence RGDR (SEQ ID NO: 2440); and a nucleic acid molecule comprising a promoter; a sequence having at least 95% sequence identity with a sequence selected from SEQ ID NOs: 2405-2407; and a dorsal root ganglia (DRG) de-targeting miRNA binding site.

[0529] Embodiment 2 is the composition of Embodiment 1, wherein the nucleic acid molecule comprises a sequence having the sequence identity with a sequence selected from SEQ ID NOs: 2405-2407.

[0530] Embodiment 3 is the composition of Embodiment 2, wherein the DRG de-targeting miRNA binding site comprises a sequence selected from among SEQ ID NOs: 2399-2401.

[0531] Embodiment 4 is the composition of Embodiment 3, wherein the promoter comprises the sequence having at least 95% sequence identity a sequence selected from among SEQ ID NOs: 2402-2404.

[0532] Embodiment 5 is the composition of Embodiment 4, wherein the nucleic acid molecule comprises in order: a first inverted terminal repeats (ITR) region; a promoter; an intron; the sequence having at least 95% sequence identity with a sequence selected from SEQ ID NOs: 2405-2407; a first DRG de-targeting miRNA binding site; a second DRG de-targeting miRNA binding site; a poly adenylation signal; and a second ITR region.

[0533] Embodiment 6 is the composition of Embodiment 5, wherein when administered to a subject with a mutation in the DMD gene, resulting in lack of dystrophin protein expression, the composition is effective at restoring a healthy phenotype.

[0534] Embodiment 7 is the composition of Embodiment 6, wherein the nucleic acid molecule comprises a sequence selected from among of SEQ ID NOs: 2412-2438.

[0535] Embodiment 8 is the composition of Embodiment 1, wherein the capsid protein comprises an amino acid sequence selected from Table 1a in hypervariable region IV (HVR IV) relative to wild type AAV9, wherein the capsid protein comprises substitutions at amino acids 451-455 relative to a wild type AAV9 vector capsid selected from column 1 of Table 1b; and a 7-mer insert selected from column 2 of Table 1b inserted after amino acid 455 relative to a wild type AAV9 vector.

[0536] Embodiment 9 is the composition of Embodiment 8, wherein the capsid protein further comprises a deletion of G267 relative to wild type AAV9 capsid or equivalent position in another AAV capsid.

[0537] Embodiment 10 is the composition of Embodiment 9, wherein the AAV vector exhibits reduced liver tropism and increased muscle tropism as compared to a wild type AAV vector.

[0538] Embodiment 11 is a method of treating a subject suffering from DMD, the method comprising providing to the subject a composition comprising an adeno-associated virus (AAV) particle comprising an engineered capsid protein comprising the amino acid sequence RGDR (SEQ ID NO: 2440); and a nucleic acid molecule comprising a promoter; a sequence having at least 95% sequence identity with a sequence selected from SEQ ID NOs: 2405-2407; and a dorsal root ganglia (DRG) de-targeting miRNA binding site.

[0539] Embodiment 12 is the method of Embodiment 11, wherein the nucleic acid molecule comprises a sequence having the sequence identity with a sequence selected from SEQ ID NOs: 2405-2407.

[0540] Embodiment 13 is the method of Embodiment 12, wherein the DRG de-targeting miRNA binding site comprises a sequence selected from among SEQ ID NOs: 2399-2401.

[0541] Embodiment 14 is the method of Embodiment 13, wherein the promoter comprises the sequence having at least 95% sequence identity a sequence selected from among SEQ ID NOs: 2402-2404.

[0542] Embodiment 15 is the method of Embodiment 14, wherein the nucleic acid molecule comprises in order: a first inverted terminal repeats (ITR) region; a promoter; an intron; the sequence having at least 95% sequence identity with a sequence selected from SEQ ID NOs: 2405-2407; a first DRG de-targeting miRNA binding site; a second DRG de-targeting miRNA binding site; a poly adenylation signal; and a second ITR region.

[0543] Embodiment 16 is the method of Embodiment 15, wherein when administered to a subject with a mutation in the DMD gene, resulting in lack of dystrophin protein expression, the method is effective at restoring a healthy phenotype.

[0544] Embodiment 17 is the method of Embodiment 16, wherein the nucleic acid molecule comprises a sequence selected from among of SEQ ID NOs: 2412-2438

[0545] Embodiment 18 is the method of Embodiment 11, wherein the capsid protein comprises an amino acid sequence selected from Table 1a in hypervariable region IV (HVR IV) relative to wild type AAV9, wherein the capsid protein comprises substitutions at amino acids 451-455 relative to a wild type AAV9 vector capsid selected from column 1 of Table 1b; and a 7-mer insert selected from column 2 of Table 1b inserted after amino acid 455 relative to a wild type AAV9 vector.

[0546] Embodiment 19 is the method of Embodiment 18, wherein the capsid protein further comprises a deletion of G267 relative to wild type AAV9 capsid or equivalent position in another AAV capsid.

[0547] Embodiment 20 is the method of Embodiment 19, wherein the AAV vector exhibits reduced liver tropism and increased muscle tropism as compared to a wild type AAV vector. Embodiment 21 is a composition comprising a nucleic acid molecule comprising a sequence having at least 95% sequence identity with a sequence selected from any one of SEQ ID NOs: 2405-2407.

[0548] Embodiment 22 is the composition of Embodiment 21, wherein the nucleic acid molecule comprises a sequence having the sequence identity of SEQ ID NO: 2405.

[0549] Embodiment 23 is the composition of Embodiment 21, wherein the nucleic acid molecule comprises a sequence having the sequence identity of SEQ ID NO: 2406.

[0550] Embodiment 24 is the composition of Embodiment 21, wherein the nucleic acid molecule comprises a sequence having the sequence identity of SEQ ID NO: 2407.

[0551] Embodiment 25 is the composition of Embodiment 21, wherein the nucleic acid molecule is packaged in a vector.

[0552] Embodiment 26 is the composition of Embodiment 25, wherein the vector is an adeno-associated viral (AAV) vector.

[0553] Embodiment 27 is the composition of Embodiment 26, wherein the nucleic acid molecule comprises, in order, an inverted terminal repeats (ITR) region; a promoter; an intron; the sequence having at least 95% sequence identity with a sequence selected from any one of SEQ ID NOs: 2405-2407; a poly adenylation signal; and an ITR region.

[0554] Embodiment 28 is the composition of Embodiment 26, wherein each AAV vector comprises a capsid protein having at least one modification that results in reduced liver-tropism of the AAV vector and/or preferential targeting of the AAV vector to muscle tissue.

[0555] Embodiment 29 is the composition of Embodiment 21, wherein, when administered to a subject with a mutation in the DMD gene, which results in lack of dystrophin protein expression, the composition is effective at restoring a healthy phenotype.

[0556] Embodiment 30 is the composition of Embodiment 21, wherein a microdystrophin protein expressed by the nucleic acid molecule is smaller than 137.5 kilodaltons.

[0557] Embodiment 31 is a method of treating a subject suffering from DMD, the method comprising providing to the subject a composition comprising a nucleic acid molecule comprising a sequence having at least 95% sequence identity with a sequence selected from any one of SEQ ID NOs: 2405-2407.

[0558] Embodiment 32 is the method of Embodiment 31, wherein the nucleic acid molecule comprises a sequence having the sequence identity of SEQ ID NO: 2405.

[0559] Embodiment 33 is the method of Embodiment 31, wherein the nucleic acid molecule comprises a sequence having the sequence identity of SEQ ID NO: 2406.

[0560] Embodiment 34 is the method of Embodiment 31, wherein the nucleic acid molecule comprises a sequence having the sequence identity of SEQ ID NO: 2407.

[0561] Embodiment 35 is the method of Embodiment 31, wherein the nucleic acid molecule is packaged is in a vector.

[0562] Embodiment 36 is the method of Embodiment 35, wherein the vector is an adeno-associated viral (AAV) vector.

[0563] Embodiment 37 is the method of Embodiment 36, wherein the nucleic acid molecule comprises, in order, an inverted terminal repeats (ITR) region; a promoter; an intron; the sequence having at least 95% sequence identity with a sequence selected from SEQ ID NO: 2405-2407; a poly adenylation signal; and an ITR region.

[0564] Embodiment 38 is the method of Embodiment 36, wherein each AAV vector comprises a capsid protein having at least one modification that results in reduced liver-tropism of the AAV vector and/or preferential targeting of the AAV vector to muscle tissue.

[0565] Embodiment 39 is the method of Embodiment 31, wherein the providing step comprises providing to a subject having a mutation in the DMD gene, which results in lack of dystrophin protein expression, the composition is effective at restoring a healthy phenotype. Embodiment 40 is the method of Embodiment 31, wherein the protein expressed by the nucleic acid molecule is smaller than 137.5 kilodaltons.

### EXAMPLES

[0566] In order that the invention described may be more fully understood, the following examples are set forth. The examples described in this application are offered to illustrate the methods and compositions provided herein and are not to be construed in any way as limiting their scope.

### Example 1: Exemplary Recombinant Nucleic Acids and AAV Particles

[0567] Exemplary AAV particles were engineered comprising the capsid protein MyoAAV-LD B comprising an RGDR (SEQ ID NO: 2440) motif and a recombinant nucleic acid (also referred to as cargo) described herein.

[0568] The capsid protein MyoAAV-LD A can be described relative to a wild type AAV9, specifically the capsid protein MyoAAV-LD A includes the amino acid sequence of LNASM (SEQ ID NO: 998) at positions 451-455, the amino acid sequence of RGDRQSL (SEQ ID NO: 1797) inserted after amino acid 455, a deletion of the amino acid G267 relative to the wild type AAV9 capsid protein, and the remainder of the capsid is otherwise identical to wild type AAV9.

[0569] The capsid protein MyoAAV-LD B can be described relative to a wild type AAV9, specifically the capsid protein MyoAAV-LD B includes the amino acid sequence of LNAST (SEQ ID NO: 1014) at positions 451-455, the amino acid sequence of RGDRQYL (SEQ ID NO: 1854) inserted after amino acid 455, a deletion of the amino acid G267 relative to the wild type AAV9 capsid protein, and the remainder of the capsid is otherwise identical to wild type AAV9.

[0570] The capsid encapsidated a cargo nucleic acid comprising a novel promoter comprising a sequence selected from any one of SEQ ID NO: 2402-2404, a codon optimized microdystrophin comprising a sequence selected from any one of SEQ ID NO: 2405-2407, and a first and a second DRG binding sites comprising a sequence selected from any one of SEQ ID NOs: 2399-2401.

[0571] Exemplary recombinant nucleic acids are described below:

Nucleic acid 1
(SEQ ID NO: 2412)
GCGCGCTCGCTCGCTCACTGAGGCCGCCCGGGCAAAGCCCGGGCGTCGGGCGACCTTTGGTCGCCCGGCCTCAGT
GAGCGAGCGAGCGCGCAGAGAGGGAGTGGCCAACTCCATCACTAGGGGTTCCTTAGTTATTAATAGTAATCAATT
ACGGGGTCATTAGTTCATAGCCCATATATGGAGTTCCGCGTTACATAACTTACGGTAAATGGCCCGCCTGGCTGA
CCGCCCAACGACCCCCGCCCATTGACGTCAATAATGACGTATGTTCCCATAGTAACGCCAATAGGGACTTTCCAT
TGACGTCAATGGGTGGAGTATTTACGGTAAACTGCCCACTTGGCAGTACATCAAGTGTATCATATGCCAAGTACG
CCCCCTATTGACGTCAATGACGGTAAATGGCCCGCCTGGCATTATGCCCAGTACATGACCTTATGGGACTTTCCT
ACTTGGCAGTACATCTACGTATTAGTCATCGCTATTACCATGCTAGACTAGCATGCTGCCCATGTAAGGAGGCAA
GGCCTGGGGACACCCGAGATGCCTGGTTATAATTAACCCAGACATGTGGCTGCCCCCCCCCCCCAACACCTGCTG
CCTCTAAAAATAACCCTGCATGCCATGTTCCCGGCGAAGGGCCAGCTGTCCCCCGCCAGCTAGACTCAGCTCTCA
GGGGCCCCTCCCTGGGGACAGCCCCTCCTGGCTAGTCACACCCTGTAGGCTCCTCTATATAACCCAGGGGCACAG
GGGCTGCCCTCATTCTACCACCACCTCCACAGCACAGACAGACACTCAGGAGCCAGCCAGCCAGCCCAGGTACCT
GGGCAGGTAAGTATCAAGGTTACAAGACAGGTTTAAGGAGACCAATAGAAACTGGGCTTGTCGAGACAGAGAAGA
CTCTTGCGTTTCTGATAGGCACCTATTGGTCTTACTGACATCCACTTTGCCTTTCTCTCCACAGGTGTCCAGACT
AGTGCCACCATGCTGTGGTGGGAGGAAGTGGAGGACTGCTACGAGAGAGAGGACGTGCAGAAGAAGACCTTCACC
AAGTGGGTGAACGCCCAGTTCAGCAAGTTCGGCAAGCAGCACATCGAGAACCTGTTCAGCGACCTGCAGGACGGC
AGAAGACTGCTGGACCTGCTGGAGGGCCTGACCGGCCAGAAGCTGCCTAAGGAGAAGGGCAGCACCAGAGTGCAC
GCTCTCAACAACGTGAACAAGGCCCTGAGAGTGCTGCAGAACAACAACGTGGACCTTGTGAACATCGGAAGCACC
GACATCGTGGATGGCAACCACAAGCTGACCCTGGGACTGATCTGGAACATCATCCTGCACTGGCAGGTGAAGAAC
GTCATGAAGAACATCATGGCCGGCCTGCAGCAGACCAACAGCGAAAAGATCCTGCTGAGCTGGGTCAGACAGAGC
ACCAGAAACTACCCTCAGGTGAACGTGATCAACTTCACCACCAGCTGGAGCGACGGCCTGGCCCTGAACGCCCTG
ATCCACAGCCACAGACCCGACCTGTTCGACTGGAACAGCGTGGTGTGCCAGCAGAGCGCCACCCAGAGACTGGAG
CACGCCTTCAACATCGCCAGATACCAGCTGGGCATCGAGAAGCTGCTGGACCCCGAGGACGTGGATACCACCTAC
CCCGACAAGAAGAGCATCCTGATGTACATCACCAGCCTGTTCCAGGTGCTGCCCCAGCAAGTGAGCATCGAGGCC
ATCCAGGAGGTGGAGATGCTGCCCAGACCTCCAAAGGTGACCAAGGAGGAGCACTTCCAGCTGCACCACCAGATG
CACTACAGCCAGCAGATCACCGTGAGCCTGGCCCAGGGCTACGAGAGAACCAGCAGCCCCAAGCCCAGATTCAAG
AGCTACGCCTACACCCAGGCCGCCTACGTGACCACCAGCGACCCCACCAGAAGCCCCTTCCCCAGCCAGCACCTG
GAGGCCCCCGAGGATAAGAGCTTCGGCAGCAGCCTGATGGAGAGCGAGGTGAACTTGGACAGATACCAGACCGCC
CTGGAGGAGGTGCTGAGCTGGCTGCTGAGCGCCGAGGACACCCTTCAGGCACAGGGCGAGATCAGCAACGACGTG
GAGGTGGTGAAGGACCAGTTCCACACCCACGAGGGCTACATGATGGACCTGACCGCCCACCAGGGCAGAGTGGGT
AACATCCTCCAGCTGGGAAGCAAGCTGATCGGCACCGGCAAGCTGAGCGAGGACGAGGAGACCGAGGTGCAAGAG
CAAATGAACCTGCTTAACAGCAGATGGGAGTGCCTGAGAGTGGCCAGCATGGAGAAGCAGAGCAACCTGCACAGA
GTGCTGATGGACCTGCAGAACCAGAAGCTGAAGGAGCTGAACGACTGGCTGACCAAGACCGAGGAGAGAACCAGA
AAGATGGAGGAGGAGCCCCTGGGCCCGGACCTGGAGGACCTGAAGCGGCAGGTGCAGCAGCACAAGGTCTTACAG
GAGGACCTGGAGCAGGAGCAAGTGAGAGTGAACAGCCTGACCCACATGGTGGTGGTGGTGGATGAGAGCAGCGGC
GACCACGCCACCGCCGCCCTGGAGGAGCAGCTGAAGGTGCTGGGCGACAGATGGGCCAACATCTGCAGATGGACC
GAGGACAGATGGGTTCTGCTGCAGGACATCCTGCTGAAGTGGCAGAGACTGACCGAGGAACAGTGCCTGTTCAGC
GCCTGGCTGAGTGAGAAGGAAGACGCTGTGAACAAGATCCACACCACCGGCTTCAAGGACCAGAACGAGATGCTG
AGCAGCCTGCAGAAGCTGGCCGTGCTGAAGGCAGACCTGGAGAAGAAAAAGCAGTCCATGGGAAAGCTGTACAGC
CTGAAGCAAGACCTGCTGAGCACCCTGAAGAACAAGAGCGTGACCCAGAAGACCGAGGCCTGGCTGGACAACTTC
GCCAGATGCTGGGACAACCTGGTTCAGAAGCTGGAGAAGAGCACCGCCCAGATCAGCCAGGCCGTGACCACCACC
CAGCCCAGCCTGACCCAGACCACCGTGATGGAGACCGTGACCACCGTGACCACCAGAGAGCAGATCCTGGTGAAG
CACGCCCAGGAGGAGCTGCCCCCTCCTCCCCCGCAAAAGAAGAGAACCCTGGAGAGACTGCAGGAGCTGCAGGAG
GCTACCGATGAGCTGGACCTGAAGCTGAGACAGGCCGAGGTGATCAAGGGCAGCTGGCAGCCCGTGGGTGACCTG
CTTATCGACAGCCTGCAGGACCACCTAGAGAAGGTGAAGGCCCTGAGAGGCGAGATCGCCCCTCTGAAGGAGAAC
GTGAGCCACGTGAACGACCTGGCCAGACAGCTGACCACCCTGGGAATCCAGCTGAGCCCCTACAACCTGAGCACC
CTGGAGGACCTGAACACGAGATGGAAGCTGCTGCAAGTGGCCGTGGAGGACAGAGTCAGACAGTTGCACGAGGCT
CACAGAGATTTCGGCCCCGCTAGTCAGCACTTCCTGAGCACCAGCGTGCAGGGCCCCTGGGAGAGAGCTATCAGC
CCAAACAAGGTGCCCTACTACATCAACCACGAGACCCAGACCACCTGCTGGGACCACCCCAAGATGACCGAGCTG
TACCAGAGCCTGGCAGACCTCAACAACGTGAGATTCAGCGCCTACAGAACCGCCATGAAGCTGAGAAGACTGCAG
AAGGCCCTGTGCCTGGACCTGCTGAGCCTGAGCGCCGCCTGCGACGCCCTGGACCAGCACAACCTGAAGCAGAAC
GACCAGCCCATGGACATCCTTCAGATCATCAACTGCCTGACCACCATCTACGACAGACTGGAGCAGGAACATAAC
AACCTGGTGAACGTGCCCCTGTGCGTGGACATGTGCCTGAACTGGCTGCTGAACGTGTACGACACCGGCAGAACA
GGCAGAATCAGAGTGCTGAGCTTCAAGACCGGCATCATCAGCCTGTGCAAGGCCCACCTGGAGGACAAGTACAGA
TACTTATTCAAGCAGGTGGCCAGCAGCACCGGCTTCTGCGATCAGAGAAGACTGGGCCTGCTGCTGCACGACAGC
ATCCAGATCCCCAGACAGCTGGGCGAAGTGGCCAGCTTCGGCGGCAGCAACATCGAGCCCAGCGTGAGAAGCTGC
TTCCAGTTCGCTAACAACAAGCCCGAGATCGAGGCCGCCCTGTTCTTGGACTGGATGAGACTGGAGCCCCAGAGC
ATGGTGTGGCTGCCCGTGCTGCACAGAGTGGCCGCCGCCGAGACCGCCAAGCACCAGGCCAAGTGTAACATCTGC
AAGGAGTGCCCAATCATCGGCTTCAGATACAGAAGCCTGAAGCACTTCAACTACGACATCTGCCAGAGCTGCTTC
TTCAGCGGCAGAGTGGCCAAGGGCCACAAGATGCACTACCCCATGGTGGAGTACTGCACCCCCACCACCAGCGGC
GAGGACGTGAGAGACTTCGCAAAGGTCCTGAAGAACAAGTTCAGAACCAAGAGATACTTCGCTAAGCACCCCAGA
ATGGGCTACCTGCCCGTGCAGACCGTGCTGGAGGGCGATAACATGGAGACCGACACCATGTGATAGATTCCAACA
AAATCACTGATGCTGGAAGATCAGCAACAAAATCACTGATGCTGGAAGACGCAGGAATAAAATATCTTTATTTTC
ATTACATCTGTGTGTTGGTTTTTTGTGTGAGGAACCCCTAGTGATGGAGTTGGCCACTCCCTCTCTGCGCGCTCG
CTCGCTCACTGAGGCCGGGCGACCAAAGGTCGCCCGACGCCCGGGCTTTGCCCGGGCGGCCTCAGTGAGCGAGCG
AGCGCGC

| Nucleic acid | |
|---|---|
| cargo 1 | |
| annotated | Sequence |
| AAV2 ITR | GCGCGCTCGCTCGCTCACTGAGGCCGCCCGGGCAAAGCCCGGGCGTCGGGCGACCTTT |
| | GGTCGCCCGGCCTCAGTGAGCGAGCGAGCGCGCAGAGAGGGAGTGGCCAACTCCATCA |
| | CTAGGGGTTCCT (SEQ ID NO: 2408) |
| Novel | TAGTTATTAATAGTAATCAATTACGGGGTCATTAGTTCATAGCCCATATATGGAGTTC |
| promoter | CGCGTTACATAACTTACGGTAAATGGCCCGCCTGGCTGACCGCCCAACGACCCCCGCC |
| | CATTGACGTCAATAATGACGTATGTTCCCATAGTAACGCCAATAGGGACTTTCCATTG |
| | ACGTCAATGGGTGGAGTATTTACGGTAAACTGCCCACTTGGCAGTACATCAAGTGTAT |
| | CATATGCCAAGTACGCCCCCTATTGACGTCAATGACGGTAAATGGCCCGCCTGGCATT |
| | ATGCCCAGTACATGACCTTATGGGACTTTCCTACTTGGCAGTACATCTACGTATTAGT |
| | CATCGCTATTACCATGCTAGACTAGCATGCTGCCCATGTAAGGAGGCAAGGCCTGGGG |
| | ACACCCGAGATGCCTGGTTATAATTAACCCAGACATGTGGCTGCCCCCCCCCCCCAAC |
| | ACCTGCTGCCTCTAAAAATAACCCTGCATGCCATGTTCCCGGCGAAGGGCCAGCTGTC |
| | CCCCGCCAGCTAGACTCAGCTCTCAGGGGCCCCTCCCTGGGGACAGCCCCTCCTGGCT |
| | AGTCACACCCTGTAGGCTCCTCTATATAACCCAGGGGCACAGGGGCTGCCCTCATTCT |
| | ACCACCACCTCCACAGCACAGACAGACACTCAGGAGCCAGCCAGC (SEQ ID NO: |
| | 2402) |
| Intron | GTAAGTATCAAGGTTACAAGACAGGTTTAAGGAGACCAATAGAAACTGGGCTTGTCGA |
| | GACAGAGAAGACTCTTGCGTTTCTGATAGGCACCTATTGGTCTTACTGACATCCACTT |
| | TGCCTTTCTCTCCACAG (SEQ ID NO: 2409) |
| Codon | ATGCTGTGGTGGGAGGAAGTGGAGGACTGCTACGAGAGAGAGGACGTGCAGAAGAAGA |
| optimized | CCTTCACCAAGTGGGTGAACGCCCAGTTCAGCAAGTTCGGCAAGCAGCACATCGAGAA |
| microdystrophin | CCTGTTCAGCGACCTGCAGGACGGCAGAAGACTGCTGGACCTGCTGGAGGGCCTGACC |
| coding | GGCCAGAAGCTGCCTAAGGAGAAGGGCAGCACCAGAGTGCACGCTCTCAACAACGTGA |
| sequence | ACAAGGCCCTGAGAGTGCTGCAGAACAACAACGTGGACCTTGTGAACATCGGAAGCAC |
| | CGACATCGTGGATGGCAACCACAAGCTGACCCTGGGACTGATCTGGAACATCATCCTG |
| | CACTGGCAGGTGAAGAACGTCATGAAGAACATCATGGCCGGCCTGCAGCAGACCAACA |
| | GCGAAAAGATCCTGCTGAGCTGGGTCAGACAGAGCACCAGAAACTACCCTCAGGTGAA |
| | CGTGATCAACTTCACCACCAGCTGGAGCGACGGCCTGGCCCTGAACGCCCTGATCCAC |
| | AGCCACAGACCCGACCTGTTCGACTGGAACAGCGTGGTGTGCCAGCAGAGCGCCACCC |
| | AGAGACTGGAGCACGCCTTCAACATCGCCAGATACCAGCTGGGCATCGAGAAGCTGCT |
| | GGACCCCGAGGACGTGGATACCACCTACCCCGACAAGAAGAGCATCCTGATGTACATC |
| | ACCAGCCTGTTCCAGGTGCTGCCCCAGCAAGTGAGCATCGAGGCCATCCAGGAGGTGG |
| | AGATGCTGCCCAGACCTCCAAAGGTGACCAAGGAGGAGCACTTCCAGCTGCACCACCA |
| | GATGCACTACAGCCAGCAGATCACCGTGAGCCTGGCCCAGGGCTACGAGAGAACCAGC |
| | AGCCCCAAGCCCAGATTCAAGAGCTACGCCTACACCCAGGCCGCCTACGTGACCACCA |
| | GCGACCCCACCAGAAGCCCCTTCCCCAGCCAGCACCTGGAGGCCCCCGAGGATAAGAG |
| | CTTCGGCAGCAGCCTGATGGAGAGCGAGGTGAACTTGGACAGATACCAGACCGCCCTG |
| | GAGGAGGTGCTGAGCTGGCTGCTGAGCGCCGAGGACACCCTTCAGGCACAGGGCGAGA |
| | TCAGCAACGACGTGGAGGTGGTGAAGGACCAGTTCCACACCCACGAGGGCTACATGAT |
| | GGACCTGACCGCCCACCAGGGCAGAGTGGGTAACATCCTCCAGCTGGGAAGCAAGCTG |
| | ATCGGCACCGGCAAGCTGAGCGAGGACGAGGAGACCGAGGTGCAAGAGCAAATGAACC |
| | TGCTTAACAGCAGATGGGAGTGCCTGAGAGTGGCCAGCATGGAGAAGCAGAGCAACCT |
| | GCACAGAGTGCTGATGGACCTGCAGAACCAGAAGCTGAAGGAGCTGAACGACTGGCTG |
| | ACCAAGACCGAGGAGAGAACCAGAAAGATGGAGGAGGAGCCCCTGGGCCCGGACCTGG |
| | AGGACCTGAAGCGGCAGGTGCAGCAGCACAAGGTCTTACAGGAGGACCTGGAGCAGGA |
| | GCAAGTGAGAGTGAACAGCCTGACCCACATGGTGGTGGTGGTGGATGAGAGCAGCGGC |
| | GACCACGCCACCGCCGCCCTGGAGGAGCAGCTGAAGGTGCTGGGCGACAGATGGGCCA |
| | ACATCTGCAGATGGACCGAGGACAGATGGGTTCTGCTGCAGGACATCCTGCTGAAGTG |
| | GCAGAGACTGACCGAGGAACAGTGCCTGTTCAGCGCCTGGCTGAGTGAGAAGGAAGAC |
| | GCTGTGAACAAGATCCACACCACCGGCTTCAAGGACCAGAACGAGATGCTGAGCAGCC |
| | TGCAGAAGCTGGCCGTGCTGAAGGCAGACCTGGAGAAGAAAAAGCAGTCCATGGGAAA |
| | GCTGTACAGCCTGAAGCAAGACCTGCTGAGCACCCTGAAGAACAAGAGCGTGACCCAG |
| | AAGACCGAGGCCTGGCTGGACAACTTCGCCAGATGCTGGGACAACCTGGTTCAGAAGC |
| | TGGAGAAGAGCACCGCCCAGATCAGCCAGGCCGTGACCACCACCCAGCCCAGCCTGAC |
| | CCAGACCACCGTGATGGAGACCGTGACCACCGTGACCACCAGAGAGCAGATCCTGGTG |
| | AAGCACGCCCAGGAGGAGCTGCCCCCTCCTCCCCCGCAAAAGAAGAGAACCCTGGAGA |
| | GACTGCAGGAGCTGCAGGAGGCTACCGATGAGCTGGACCTGAAGCTGAGACAGGCCGA |
| | GGTGATCAAGGGCAGCTGGCAGCCCGTGGGTGACCTGCTTATCGACAGCCTGCAGGAC |
| | CACCTAGAGAAGGTGAAGGCCCTGAGAGGCGAGATCGCCCCTCTGAAGGAGAACGTGA |
| | GCCACGTGAACGACCTGGCCAGACAGCTGACCACCCTGGGAATCCAGCTGAGCCCCTA |
| | CAACCTGAGCACCCTGGAGGACCTGAACACGAGATGGAAGCTGCTGCAAGTGGCCGTG |
| | GAGGACAGAGTCAGACAGTTGCACGAGGCTCACAGAGATTTCGGCCCCGCTAGTCAGC |
| | ACTTCCTGAGCACCAGCGTGCAGGGCCCCTGGGAGAGAGCTATCAGCCCAAACAAGGT |
| | GCCCTACTACATCAACCACGAGACCCAGACCACCTGCTGGGACCACCCCAAGATGACC |
| | GAGCTGTACCAGAGCCTGGCAGACCTCAACAACGTGAGATTCAGCGCCTACAGAACCG |
| | CCATGAAGCTGAGAAGACTGCAGAAGGCCCTGTGCCTGGACCTGCTGAGCCTGAGCGC |
| | CGCCTGCGACGCCCTGGACCAGCACAACCTGAAGCAGAACGACCAGCCCATGGACATC |
| | CTTCAGATCATCAACTGCCTGACCACCATCTACGACAGACTGGAGCAGGAACATAACA |
| | ACCTGGTGAACGTGCCCCTGTGCGTGGACATGTGCCTGAACTGGCTGCTGAACGTGTA |
| | CGACACCGGCAGAACAGGCAGAATCAGAGTGCTGAGCTTCAAGACCGGCATCATCAGC |
| | CTGTGCAAGGCCCACCTGGAGGACAAGTACAGATACTTATTCAAGCAGGTGGCCAGCA |
| | GCACCGGCTTCTGCGATCAGAGAAGACTGGGCCTGCTGCTGCACGACAGCATCCAGAT |
| | CCCCAGACAGCTGGGCGAAGTGGCCAGCTTCGGCGGCAGCAACATCGAGCCCAGCGTG |
| | AGAAGCTGCTTCCAGTTCGCTAACAACAAGCCCGAGATCGAGGCCGCCCTGTTCTTGG |
| | ACTGGATGAGACTGGAGCCCCAGAGCATGGTGTGGCTGCCCGTGCTGCACAGAGTGGC |
| | CGCCGCCGAGACCGCCAAGCACCAGGCCAAGTGTAACATCTGCAAGGAGTGCCCAATC |
| | ATCGGCTTCAGATACAGAAGCCTGAAGCACTTCAACTACGACATCTGCCAGAGCTGCT |
| | TCTTCAGCGGCAGAGTGGCCAAGGGCCACAAGATGCACTACCCCATGGTGGAGTACTG |
| | CACCCCCACCACCAGCGGCGAGGACGTGAGAGACTTCGCAAAGGTCCTGAAGAACAAG |
| | TTCAGAACCAAGAGATACTTCGCTAAGCACCCCAGAATGGGCTACCTGCCCGTGCAGA |
| | CCGTGCTGGAGGGCGATAACATGGAGACCGACACCATGTGA (SEQ ID NO: |
| | 2405) |
| First DRG de- | CAACAAAATCACTGATGCTGGA (SEQ ID NO: 2399) |
| targeting | |
| miRNA binding | |
| site | |
| Second DRG | CAACAAAATCACTGATGCTGGA (SEQ ID NO: 2399) |
| de-targeting | |
| miRNA binding | |
| site | |
| Short polyA | AGGAATAAAATATCTTTATTTTCATTACATCTGTGTGTTGGTTTTTTGTGTG (SEQ |
| | ID NO: 2410) |
| AAV2 ITR | AGGAACCCCTAGTGATGGAGTTGGCCACTCCCTCTCTGCGCGCTCGCTCGCTCACTGA |
| | GGCCGGGCGACCAAAGGTCGCCCGACGCCCGGGCTTTGCCCGGGCGGCCTCAGTGAGC |
| | GAGCGAGCGCGC (SEQ ID NO: 2411) |

Nucleic acid 2
(SEQ ID NO: 2413)
GCGCGCTCGCTCGCTCACTGAGGCCGCCCGGGCAAAGCCCGGGCGTCGGGCGACCTTTGGTCGCCCGGCCTCAGT
GAGCGAGCGAGCGCGCAGAGAGGGAGTGGCCAACTCCATCACTAGGGGTTCCTCGTCTGTCTAATTCCAGCCAAG
GGCATGGGGGAAAGGACAGAGCCCAGGGACCTGTGGCCTATTCTCTGAGAGGACGCTGGGCTAATAATAGGAGGG
GAGATTAGGGAGGGATTTGACTGCATTGTTATCTCACAGGAATGGCGTTTGAGAGCCTTGCTTCCAAGCTCTTCC
AAGAGTCATGCCACCCCCCTCCAATCTCTGTGGAAGTGCCCACTGCCTTTCCCGCTTCGTTCTCTTCTCTCTAAA
TCTGAGCCCACCCCACTCAGGGGTACAGGATCTGGTTCATTTATCTCCCAGAATGATGCCTTGGGTTGCGTCCCC
TCTAAACTCTGGCACATTCCAGCCCCTCTTTGGGAGAAAGAACATCTCTTCTTGCCCAGGCCCTAGTGAGACATG
CATCGCAAGACATGCTCCCCCCTTCCTCCCCGCTGGGCTCCAGCTGCTGCCAGCCCTCCAAGAAAGGAGAGGCCC
TGAGTTGGGCTATTTTGGTATCTGGGGTGGGCACCCGCAGGGCTAAGGTTACCTTGGTATGTTAAGGGCTCCCTG
GGGCAGGACTATATAACCCCAGAGGGACTGCCCCATGCTGACTCCTTGCTTCTTTCCTGCTCGAGCCGCTGCCTT
GCCCCCCGGAGACTGAAGACACAGCCCAGGTACCTGGGCAGGTAAGTATCAAGGTTACAAGACAGGTTTAAGGAG
ACCAATAGAAACTGGGCTTGTCGAGACAGAGAAGACTCTTGCGTTTCTGATAGGCACCTATTGGTCTTACTGACA
TCCACTTTGCCTTTCTCTCCACAGGTGTCCAGACTAGTGCCACCATGCTGTGGTGGGAGGAAGTGGAGGACTGCT
ACGAGAGAGAGGACGTGCAGAAGAAGACCTTCACCAAGTGGGTGAACGCCCAGTTCAGCAAGTTCGGCAAGCAGC
ACATCGAGAACCTGTTCAGCGACCTGCAGGACGGCAGAAGACTGCTGGACCTGCTGGAGGGCCTGACCGGCCAGA
AGCTGCCTAAGGAGAAGGGCAGCACCAGAGTGCACGCTCTCAACAACGTGAACAAGGCCCTGAGAGTGCTGCAGA
ACAACAACGTGGACCTTGTGAACATCGGAAGCACCGACATCGTGGATGGCAACCACAAGCTGACCCTGGGACTGA
TCTGGAACATCATCCTGCACTGGCAGGTGAAGAACGTCATGAAGAACATCATGGCCGGCCTGCAGCAGACCAACA
GCGAAAAGATCCTGCTGAGCTGGGTCAGACAGAGCACCAGAAACTACCCTCAGGTGAACGTGATCAACTTCACCA
CCAGCTGGAGCGACGGCCTGGCCCTGAACGCCCTGATCCACAGCCACAGACCCGACCTGTTCGACTGGAACAGCG
TGGTGTGCCAGCAGAGCGCCACCCAGAGACTGGAGCACGCCTTCAACATCGCCAGATACCAGCTGGGCATCGAGA
AGCTGCTGGACCCCGAGGACGTGGATACCACCTACCCCGACAAGAAGAGCATCCTGATGTACATCACCAGCCTGT
TCCAGGTGCTGCCCCAGCAAGTGAGCATCGAGGCCATCCAGGAGGTGGAGATGCTGCCCAGACCTCCAAAGGTGA
CCAAGGAGGAGCACTTCCAGCTGCACCACCAGATGCACTACAGCCAGCAGATCACCGTGAGCCTGGCCCAGGGCT
ACGAGAGAACCAGCAGCCCCAAGCCCAGATTCAAGAGCTACGCCTACACCCAGGCCGCCTACGTGACCACCAGCG
ACCCCACCAGAAGCCCCTTCCCCAGCCAGCACCTGGAGGCCCCCGAGGATAAGAGCTTCGGCAGCAGCCTGATGG
AGAGCGAGGTGAACTTGGACAGATACCAGACCGCCCTGGAGGAGGTGCTGAGCTGGCTGCTGAGCGCCGAGGACA
CCCTTCAGGCACAGGGCGAGATCAGCAACGACGTGGAGGTGGTGAAGGACCAGTTCCACACCCACGAGGGCTACA
TGATGGACCTGACCGCCCACCAGGGCAGAGTGGGTAACATCCTCCAGCTGGGAAGCAAGCTGATCGGCACCGGCA
AGCTGAGCGAGGACGAGGAGACCGAGGTGCAAGAGCAAATGAACCTGCTTAACAGCAGATGGGAGTGCCTGAGAG
TGGCCAGCATGGAGAAGCAGAGCAACCTGCACAGAGTGCTGATGGACCTGCAGAACCAGAAGCTGAAGGAGCTGA
ACGACTGGCTGACCAAGACCGAGGAGAGAACCAGAAAGATGGAGGAGGAGCCCCTGGGCCCGGACCTGGAGGACC
TGAAGCGGCAGGTGCAGCAGCACAAGGTCTTACAGGAGGACCTGGAGCAGGAGCAAGTGAGAGTGAACAGCCTGA
CCCACATGGTGGTGGTGGTGGATGAGAGCAGCGGCGACCACGCCACCGCCGCCCTGGAGGAGCAGCTGAAGGTGC
TGGGCGACAGATGGGCCAACATCTGCAGATGGACCGAGGACAGATGGGTTCTGCTGCAGGACATCCTGCTGAAGT
GGCAGAGACTGACCGAGGAACAGTGCCTGTTCAGCGCCTGGCTGAGTGAGAAGGAAGACGCTGTGAACAAGATCC
ACACCACCGGCTTCAAGGACCAGAACGAGATGCTGAGCAGCCTGCAGAAGCTGGCCGTGCTGAAGGCAGACCTGG
AGAAGAAAAAGCAGTCCATGGGAAAGCTGTACAGCCTGAAGCAAGACCTGCTGAGCACCCTGAAGAACAAGAGCG
TGACCCAGAAGACCGAGGCCTGGCTGGACAACTTCGCCAGATGCTGGGACAACCTGGTTCAGAAGCTGGAGAAGA
GCACCGCCCAGATCAGCCAGGCCGTGACCACCACCCAGCCCAGCCTGACCCAGACCACCGTGATGGAGACCGTGA
CCACCGTGACCACCAGAGAGCAGATCCTGGTGAAGCACGCCCAGGAGGAGCTGCCCCCTCCTCCCCCGCAAAAGA
AGAGAACCCTGGAGAGACTGCAGGAGCTGCAGGAGGCTACCGATGAGCTGGACCTGAAGCTGAGACAGGCCGAGG
TGATCAAGGGCAGCTGGCAGCCCGTGGGTGACCTGCTTATCGACAGCCTGCAGGACCACCTAGAGAAGGTGAAGG
CCCTGAGAGGCGAGATCGCCCCTCTGAAGGAGAACGTGAGCCACGTGAACGACCTGGCCAGACAGCTGACCACCC
TGGGAATCCAGCTGAGCCCCTACAACCTGAGCACCCTGGAGGACCTGAACACGAGATGGAAGCTGCTGCAAGTGG
CCGTGGAGGACAGAGTCAGACAGTTGCACGAGGCTCACAGAGATTTCGGCCCCGCTAGTCAGCACTTCCTGAGCA
CCAGCGTGCAGGGCCCCTGGGAGAGAGCTATCAGCCCAAACAAGGTGCCCTACTACATCAACCACGAGACCCAGA
CCACCTGCTGGGACCACCCCAAGATGACCGAGCTGTACCAGAGCCTGGCAGACCTCAACAACGTGAGATTCAGCG
CCTACAGAACCGCCATGAAGCTGAGAAGACTGCAGAAGGCCCTGTGCCTGGACCTGCTGAGCCTGAGCGCCGCCT
GCGACGCCCTGGACCAGCACAACCTGAAGCAGAACGACCAGCCCATGGACATCCTTCAGATCATCAACTGCCTGA
CCACCATCTACGACAGACTGGAGCAGGAACATAACAACCTGGTGAACGTGCCCCTGTGCGTGGACATGTGCCTGA
ACTGGCTGCTGAACGTGTACGACACCGGCAGAACAGGCAGAATCAGAGTGCTGAGCTTCAAGACCGGCATCATCA
GCCTGTGCAAGGCCCACCTGGAGGACAAGTACAGATACTTATTCAAGCAGGTGGCCAGCAGCACCGGCTTCTGCG
ATCAGAGAAGACTGGGCCTGCTGCTGCACGACAGCATCCAGATCCCCAGACAGCTGGGCGAAGTGGCCAGCTTCG
GCGGCAGCAACATCGAGCCCAGCGTGAGAAGCTGCTTCCAGTTCGCTAACAACAAGCCCGAGATCGAGGCCGCCC
TGTTCTTGGACTGGATGAGACTGGAGCCCCAGAGCATGGTGTGGCTGCCCGTGCTGCACAGAGTGGCCGCCGCCG
AGACCGCCAAGCACCAGGCCAAGTGTAACATCTGCAAGGAGTGCCCAATCATCGGCTTCAGATACAGAAGCCTGA
AGCACTTCAACTACGACATCTGCCAGAGCTGCTTCTTCAGCGGCAGAGTGGCCAAGGGCCACAAGATGCACTACC
CCATGGTGGAGTACTGCACCCCCACCACCAGCGGCGAGGACGTGAGAGACTTCGCAAAGGTCCTGAAGAACAAGT
TCAGAACCAAGAGATACTTCGCTAAGCACCCCAGAATGGGCTACCTGCCCGTGCAGACCGTGCTGGAGGGCGATA
ACATGGAGACCGACACCATGTGATAGATTCCAACAAAATCACTGATGCTGGAAGATCAGCAACAAAATCACTGAT
GCTGGAAGACGCAGGAATAAAATATCTTTATTTTCATTACATCTGTGTGTTGGTTTTTTGTGTGAGGAACCCCTA
GTGATGGAGTTGGCCACTCCCTCTCTGCGCGCTCGCTCGCTCACTGAGGCCGGGCGACCAAAGGTCGCCCGACGC
CCGGGCTTTGCCCGGGCGGCCTCAGTGAGCGAGCGAGCGCGC

| Nucleic acid | |
|---|---|
| cargo 2 | |
| annotated | Sequence |
| AAV2 ITR | GCGCGCTCGCTCGCTCACTGAGGCCGCCCGGGCAAAGCCCGGGCGTCGGGCGACCTT |
| | TGGTCGCCCGGCCTCAGTGAGCGAGCGAGCGCGCAGAGAGGGAGTGGCCAACTCCAT |
| | CACTAGGGGTTCCT (SEQ ID NO: 2408) |
| Novel | CGTCTGTCTAATTCCAGCCAAGGGCATGGGGGAAAGGACAGAGCCCAGGGACCTGTG |
| promoter | GCCTATTCTCTGAGAGGACGCTGGGCTAATAATAGGAGGGGAGATTAGGGAGGGATT |
| | TGACTGCATTGTTATCTCACAGGAATGGCGTTTGAGAGCCTTGCTTCCAAGCTCTTC |
| | CAAGAGTCATGCCACCCCCCTCCAATCTCTGTGGAAGTGCCCACTGCCTTTCCCGCT |
| | TCGTTCTCTTCTCTCTAAATCTGAGCCCACCCCACTCAGGGGTACAGGATCTGGTTC |
| | ATTTATCTCCCAGAATGATGCCTTGGGTTGCGTCCCCTCTAAACTCTGGCACATTCC |
| | AGCCCCTCTTTGGGAGAAAGAACATCTCTTCTTGCCCAGGCCCTAGTGAGACATGCA |
| | TCGCAAGACATGCTCCCCCCTTCCTCCCCGCTGGGCTCCAGCTGCTGCCAGCCCTCC |
| | AAGAAAGGAGAGGCCCTGAGTTGGGCTATTTTGGTATCTGGGGTGGGCACCCGCAGG |
| | GCTAAGGTTACCTTGGTATGTTAAGGGCTCCCTGGGGCAGGACTATATAACCCCAGA |
| | GGGACTGCCCCATGCTGACTCCTTGCTTCTTTCCTGCTCGAGCCGCTGCCTTGCCCC |
| | CCGGAGACTGAAGACA (SEQ ID NO: 2403) |
| Intron | GTAAGTATCAAGGTTACAAGACAGGTTTAAGGAGACCAATAGAAACTGGGCTTGTCG |
| | AGACAGAGAAGACTCTTGCGTTTCTGATAGGCACCTATTGGTCTTACTGACATCCAC |
| | TTTGCCTTTCTCTCCACAG (SEQ ID NO: 2409) |
| Codon | ATGCTGTGGTGGGAGGAAGTGGAGGACTGCTACGAGAGAGAGGACGTGCAGAAGAAG |
| optimized | ACCTTCACCAAGTGGGTGAACGCCCAGTTCAGCAAGTTCGGCAAGCAGCACATCGAG |
| microdystrophin | AACCTGTTCAGCGACCTGCAGGACGGCAGAAGACTGCTGGACCTGCTGGAGGGCCTG |
| coding | ACCGGCCAGAAGCTGCCTAAGGAGAAGGGCAGCACCAGAGTGCACGCTCTCAACAAC |
| sequence | GTGAACAAGGCCCTGAGAGTGCTGCAGAACAACAACGTGGACCTTGTGAACATCGGA |
| | AGCACCGACATCGTGGATGGCAACCACAAGCTGACCCTGGGACTGATCTGGAACATC |
| | ATCCTGCACTGGCAGGTGAAGAACGTCATGAAGAACATCATGGCCGGCCTGCAGCAG |
| | ACCAACAGCGAAAAGATCCTGCTGAGCTGGGTCAGACAGAGCACCAGAAACTACCCT |
| | CAGGTGAACGTGATCAACTTCACCACCAGCTGGAGCGACGGCCTGGCCCTGAACGCC |
| | CTGATCCACAGCCACAGACCCGACCTGTTCGACTGGAACAGCGTGGTGTGCCAGCAG |
| | AGCGCCACCCAGAGACTGGAGCACGCCTTCAACATCGCCAGATACCAGCTGGGCATC |
| | GAGAAGCTGCTGGACCCCGAGGACGTGGATACCACCTACCCCGACAAGAAGAGCATC |
| | CTGATGTACATCACCAGCCTGTTCCAGGTGCTGCCCCAGCAAGTGAGCATCGAGGCC |
| | ATCCAGGAGGTGGAGATGCTGCCCAGACCTCCAAAGGTGACCAAGGAGGAGCACTTC |
| | CAGCTGCACCACCAGATGCACTACAGCCAGCAGATCACCGTGAGCCTGGCCCAGGGC |
| | TACGAGAGAACCAGCAGCCCCAAGCCCAGATTCAAGAGCTACGCCTACACCCAGGCC |
| | GCCTACGTGACCACCAGCGACCCCACCAGAAGCCCCTTCCCCAGCCAGCACCTGGAG |
| | GCCCCCGAGGATAAGAGCTTCGGCAGCAGCCTGATGGAGAGCGAGGTGAACTTGGAC |
| | AGATACCAGACCGCCCTGGAGGAGGTGCTGAGCTGGCTGCTGAGCGCCGAGGACACC |
| | CTTCAGGCACAGGGCGAGATCAGCAACGACGTGGAGGTGGTGAAGGACCAGTTCCAC |
| | ACCCACGAGGGCTACATGATGGACCTGACCGCCCACCAGGGCAGAGTGGGTAACATC |
| | CTCCAGCTGGGAAGCAAGCTGATCGGCACCGGCAAGCTGAGCGAGGACGAGGAGACC |
| | GAGGTGCAAGAGCAAATGAACCTGCTTAACAGCAGATGGGAGTGCCTGAGAGTGGCC |
| | AGCATGGAGAAGCAGAGCAACCTGCACAGAGTGCTGATGGACCTGCAGAACCAGAAG |
| | CTGAAGGAGCTGAACGACTGGCTGACCAAGACCGAGGAGAGAACCAGAAAGATGGAG |
| | GAGGAGCCCCTGGGCCCGGACCTGGAGGACCTGAAGCGGCAGGTGCAGCAGCACAAG |
| | GTCTTACAGGAGGACCTGGAGCAGGAGCAAGTGAGAGTGAACAGCCTGACCCACATG |
| | GTGGTGGTGGTGGATGAGAGCAGCGGCGACCACGCCACCGCCGCCCTGGAGGAGCAG |
| | CTGAAGGTGCTGGGCGACAGATGGGCCAACATCTGCAGATGGACCGAGGACAGATGG |
| | GTTCTGCTGCAGGACATCCTGCTGAAGTGGCAGAGACTGACCGAGGAACAGTGCCTG |
| | TTCAGCGCCTGGCTGAGTGAGAAGGAAGACGCTGTGAACAAGATCCACACCACCGGC |
| | TTCAAGGACCAGAACGAGATGCTGAGCAGCCTGCAGAAGCTGGCCGTGCTGAAGGCA |
| | GACCTGGAGAAGAAAAAGCAGTCCATGGGAAAGCTGTACAGCCTGAAGCAAGACCTG |
| | CTGAGCACCCTGAAGAACAAGAGCGTGACCCAGAAGACCGAGGCCTGGCTGGACAAC |
| | TTCGCCAGATGCTGGGACAACCTGGTTCAGAAGCTGGAGAAGAGCACCGCCCAGATC |
| | AGCCAGGCCGTGACCACCACCCAGCCCAGCCTGACCCAGACCACCGTGATGGAGACC |
| | GTGACCACCGTGACCACCAGAGAGCAGATCCTGGTGAAGCACGCCCAGGAGGAGCTG |
| | CCCCCTCCTCCCCCGCAAAAGAAGAGAACCCTGGAGAGACTGCAGGAGCTGCAGGAG |
| | GCTACCGATGAGCTGGACCTGAAGCTGAGACAGGCCGAGGTGATCAAGGGCAGCTGG |
| | CAGCCCGTGGGTGACCTGCTTATCGACAGCCTGCAGGACCACCTAGAGAAGGTGAAG |
| | GCCCTGAGAGGCGAGATCGCCCCTCTGAAGGAGAACGTGAGCCACGTGAACGACCTG |
| | GCCAGACAGCTGACCACCCTGGGAATCCAGCTGAGCCCCTACAACCTGAGCACCCTG |
| | GAGGACCTGAACACGAGATGGAAGCTGCTGCAAGTGGCCGTGGAGGACAGAGTCAGA |
| | CAGTTGCACGAGGCTCACAGAGATTTCGGCCCCGCTAGTCAGCACTTCCTGAGCACC |
| | AGCGTGCAGGGCCCCTGGGAGAGAGCTATCAGCCCAAACAAGGTGCCCTACTACATC |
| | AACCACGAGACCCAGACCACCTGCTGGGACCACCCCAAGATGACCGAGCTGTACCAG |
| | AGCCTGGCAGACCTCAACAACGTGAGATTCAGCGCCTACAGAACCGCCATGAAGCTG |
| | AGAAGACTGCAGAAGGCCCTGTGCCTGGACCTGCTGAGCCTGAGCGCCGCCTGCGAC |
| | GCCCTGGACCAGCACAACCTGAAGCAGAACGACCAGCCCATGGACATCCTTCAGATC |
| | ATCAACTGCCTGACCACCATCTACGACAGACTGGAGCAGGAACATAACAACCTGGTG |
| | AACGTGCCCCTGTGCGTGGACATGTGCCTGAACTGGCTGCTGAACGTGTACGACACC |
| | GGCAGAACAGGCAGAATCAGAGTGCTGAGCTTCAAGACCGGCATCATCAGCCTGTGC |
| | AAGGCCCACCTGGAGGACAAGTACAGATACTTATTCAAGCAGGTGGCCAGCAGCACC |
| | GGCTTCTGCGATCAGAGAAGACTGGGCCTGCTGCTGCACGACAGCATCCAGATCCCC |
| | AGACAGCTGGGCGAAGTGGCCAGCTTCGGCGGCAGCAACATCGAGCCCAGCGTGAGA |
| | AGCTGCTTCCAGTTCGCTAACAACAAGCCCGAGATCGAGGCCGCCCTGTTCTTGGAC |
| | TGGATGAGACTGGAGCCCCAGAGCATGGTGTGGCTGCCCGTGCTGCACAGAGTGGCC |
| | GCCGCCGAGACCGCCAAGCACCAGGCCAAGTGTAACATCTGCAAGGAGTGCCCAATC |
| | ATCGGCTTCAGATACAGAAGCCTGAAGCACTTCAACTACGACATCTGCCAGAGCTGC |
| | TTCTTCAGCGGCAGAGTGGCCAAGGGCCACAAGATGCACTACCCCATGGTGGAGTAC |
| | TGCACCCCCACCACCAGCGGCGAGGACGTGAGAGACTTCGCAAAGGTCCTGAAGAAC |
| | AAGTTCAGAACCAAGAGATACTTCGCTAAGCACCCCAGAATGGGCTACCTGCCCGTG |
| | CAGACCGTGCTGGAGGGCGATAACATGGAGACCGACACCATGTGA (SEQ ID NO: |
| | 2405) |
| First DRG de- | CAACAAAATCACTGATGCTGGA (SEQ ID NO: 2399) |
| targeting | |
| miRNA binding | |
| site | |
| Second DRG | CAACAAAATCACTGATGCTGGA (SEQ ID NO: 2399) |
| de-targeting | |
| miRNA binding | |
| site | |
| Short polyA | AGGAATAAAATATCTTTATTTTCATTACATCTGTGTGTTGGTTTTTTGTGTG (SEQ |
| | ID NO: 2410) |
| AAV2 ITR | AGGAACCCCTAGTGATGGAGTTGGCCACTCCCTCTCTGCGCGCTCGCTCGCTCACTG |
| | AGGCCGGGCGACCAAAGGTCGCCCGACGCCCGGGCTTTGCCCGGGCGGCCTCAGTGA |
| | GCGAGCGAGCGCGC (SEQ ID NO: 2411) |

Nucleic acid 3
(SEQ ID NO: 2414)
GCGCGCTCGCTCGCTCACTGAGGCCGCCCGGGCAAAGCCCGGGCGTCGGGCGACCTTTGGTCGCCCGGCCTCAGT
GAGCGAGCGAGCGCGCAGAGAGGGAGTGGCCAACTCCATCACTAGGGGTTCCTCGTCTGTCTAATTCCAGCCAAG
GGCATGGGGGAAAGGACAGAGCCCAGGGACCTGTGGCCTATTCTCTGAGAGGACGCTGGGCTAATAATAGGAGGG
GAGATTAGGGAGGGATTTGACTGCATTGTTATCTCACAGGAATGGCGTTTGAGAGCCTTGCTTCCAAGCTCTTCC
AAGAGTCATGCCACCCCCCTCCAATCTCTGTGGAAGTGCCCACTGCCTTTCCCGCTTCGTTCTCTTCTCTCGGTC
CCATCCCTGACCCACTAGCCTGGTGCCGGGGGGAGACCAATTTCTGGAGGAAGCTCTGGGTACCCAGTCTTGCCC
TAAGCCTGCCTCTGAACAGGCTGTTCTTGTTTATGACCCCCGTCCCAGCAGAATAGTGATTGCTCATCCCTGCAT
GTGATTTGAGAGGGCCAGTCTTTCAGGCCTGGAGGAAACTCAAGCCCCACCAGCCGCTTGGCATCGGAATGCTCA
GCTGGTCCCCTCCTGGGGCTCATGTGACCAAGATCTAGCTATAAATATCAGAGGGGCCTCAGACCAAGACAGAAT
TCGGGCACCAGGAGAAGGAAGCCAACAGGATCCGACCCGGTGTTTTGTGACAAAGGCAAGACCCCCAGGTCTACT
TAGAGCAACGTTAGTAGAGGACAGCCCAGGTACCTGGGCAGGTAAGTATCAAGGTTACAAGACAGGTTTAAGGAG
ACCAATAGAAACTGGGCTTGTCGAGACAGAGAAGACTCTTGCGTTTCTGATAGGCACCTATTGGTCTTACTGACA
TCCACTTTGCCTTTCTCTCCACAGGTGTCCAGACTAGTGCCACCATGCTGTGGTGGGAGGAAGTGGAGGACTGCT
ACGAGAGAGAGGACGTGCAGAAGAAGACCTTCACCAAGTGGGTGAACGCCCAGTTCAGCAAGTTCGGCAAGCAGC
ACATCGAGAACCTGTTCAGCGACCTGCAGGACGGCAGAAGACTGCTGGACCTGCTGGAGGGCCTGACCGGCCAGA
AGCTGCCTAAGGAGAAGGGCAGCACCAGAGTGCACGCTCTCAACAACGTGAACAAGGCCCTGAGAGTGCTGCAGA
ACAACAACGTGGACCTTGTGAACATCGGAAGCACCGACATCGTGGATGGCAACCACAAGCTGACCCTGGGACTGA
TCTGGAACATCATCCTGCACTGGCAGGTGAAGAACGTCATGAAGAACATCATGGCCGGCCTGCAGCAGACCAACA
GCGAAAAGATCCTGCTGAGCTGGGTCAGACAGAGCACCAGAAACTACCCTCAGGTGAACGTGATCAACTTCACCA
CCAGCTGGAGCGACGGCCTGGCCCTGAACGCCCTGATCCACAGCCACAGACCCGACCTGTTCGACTGGAACAGCG
TGGTGTGCCAGCAGAGCGCCACCCAGAGACTGGAGCACGCCTTCAACATCGCCAGATACCAGCTGGGCATCGAGA
AGCTGCTGGACCCCGAGGACGTGGATACCACCTACCCCGACAAGAAGAGCATCCTGATGTACATCACCAGCCTGT
TCCAGGTGCTGCCCCAGCAAGTGAGCATCGAGGCCATCCAGGAGGTGGAGATGCTGCCCAGACCTCCAAAGGTGA
CCAAGGAGGAGCACTTCCAGCTGCACCACCAGATGCACTACAGCCAGCAGATCACCGTGAGCCTGGCCCAGGGCT
ACGAGAGAACCAGCAGCCCCAAGCCCAGATTCAAGAGCTACGCCTACACCCAGGCCGCCTACGTGACCACCAGCG
ACCCCACCAGAAGCCCCTTCCCCAGCCAGCACCTGGAGGCCCCCGAGGATAAGAGCTTCGGCAGCAGCCTGATGG
AGAGCGAGGTGAACTTGGACAGATACCAGACCGCCCTGGAGGAGGTGCTGAGCTGGCTGCTGAGCGCCGAGGACA
CCCTTCAGGCACAGGGCGAGATCAGCAACGACGTGGAGGTGGTGAAGGACCAGTTCCACACCCACGAGGGCTACA
TGATGGACCTGACCGCCCACCAGGGCAGAGTGGGTAACATCCTCCAGCTGGGAAGCAAGCTGATCGGCACCGGCA
AGCTGAGCGAGGACGAGGAGACCGAGGTGCAAGAGCAAATGAACCTGCTTAACAGCAGATGGGAGTGCCTGAGAG
TGGCCAGCATGGAGAAGCAGAGCAACCTGCACAGAGTGCTGATGGACCTGCAGAACCAGAAGCTGAAGGAGCTGA
ACGACTGGCTGACCAAGACCGAGGAGAGAACCAGAAAGATGGAGGAGGAGCCCCTGGGCCCGGACCTGGAGGACC
TGAAGCGGCAGGTGCAGCAGCACAAGGTCTTACAGGAGGACCTGGAGCAGGAGCAAGTGAGAGTGAACAGCCTGA
CCCACATGGTGGTGGTGGTGGATGAGAGCAGCGGCGACCACGCCACCGCCGCCCTGGAGGAGCAGCTGAAGGTGC
TGGGCGACAGATGGGCCAACATCTGCAGATGGACCGAGGACAGATGGGTTCTGCTGCAGGACATCCTGCTGAAGT
GGCAGAGACTGACCGAGGAACAGTGCCTGTTCAGCGCCTGGCTGAGTGAGAAGGAAGACGCTGTGAACAAGATCC
ACACCACCGGCTTCAAGGACCAGAACGAGATGCTGAGCAGCCTGCAGAAGCTGGCCGTGCTGAAGGCAGACCTGG
AGAAGAAAAAGCAGTCCATGGGAAAGCTGTACAGCCTGAAGCAAGACCTGCTGAGCACCCTGAAGAACAAGAGCG
TGACCCAGAAGACCGAGGCCTGGCTGGACAACTTCGCCAGATGCTGGGACAACCTGGTTCAGAAGCTGGAGAAGA
GCACCGCCCAGATCAGCCAGGCCGTGACCACCACCCAGCCCAGCCTGACCCAGACCACCGTGATGGAGACCGTGA
CCACCGTGACCACCAGAGAGCAGATCCTGGTGAAGCACGCCCAGGAGGAGCTGCCCCCTCCTCCCCCGCAAAAGA
AGAGAACCCTGGAGAGACTGCAGGAGCTGCAGGAGGCTACCGATGAGCTGGACCTGAAGCTGAGACAGGCCGAGG
TGATCAAGGGCAGCTGGCAGCCCGTGGGTGACCTGCTTATCGACAGCCTGCAGGACCACCTAGAGAAGGTGAAGG
CCCTGAGAGGCGAGATCGCCCCTCTGAAGGAGAACGTGAGCCACGTGAACGACCTGGCCAGACAGCTGACCACCC
TGGGAATCCAGCTGAGCCCCTACAACCTGAGCACCCTGGAGGACCTGAACACGAGATGGAAGCTGCTGCAAGTGG
CCGTGGAGGACAGAGTCAGACAGTTGCACGAGGCTCACAGAGATTTCGGCCCCGCTAGTCAGCACTTCCTGAGCA
CCAGCGTGCAGGGCCCCTGGGAGAGAGCTATCAGCCCAAACAAGGTGCCCTACTACATCAACCACGAGACCCAGA
CCACCTGCTGGGACCACCCCAAGATGACCGAGCTGTACCAGAGCCTGGCAGACCTCAACAACGTGAGATTCAGCG
CCTACAGAACCGCCATGAAGCTGAGAAGACTGCAGAAGGCCCTGTGCCTGGACCTGCTGAGCCTGAGCGCCGCCT
GCGACGCCCTGGACCAGCACAACCTGAAGCAGAACGACCAGCCCATGGACATCCTTCAGATCATCAACTGCCTGA
CCACCATCTACGACAGACTGGAGCAGGAACATAACAACCTGGTGAACGTGCCCCTGTGCGTGGACATGTGCCTGA
ACTGGCTGCTGAACGTGTACGACACCGGCAGAACAGGCAGAATCAGAGTGCTGAGCTTCAAGACCGGCATCATCA
GCCTGTGCAAGGCCCACCTGGAGGACAAGTACAGATACTTATTCAAGCAGGTGGCCAGCAGCACCGGCTTCTGCG
ATCAGAGAAGACTGGGCCTGCTGCTGCACGACAGCATCCAGATCCCCAGACAGCTGGGCGAAGTGGCCAGCTTCG
GCGGCAGCAACATCGAGCCCAGCGTGAGAAGCTGCTTCCAGTTCGCTAACAACAAGCCCGAGATCGAGGCCGCCC
TGTTCTTGGACTGGATGAGACTGGAGCCCCAGAGCATGGTGTGGCTGCCCGTGCTGCACAGAGTGGCCGCCGCCG
AGACCGCCAAGCACCAGGCCAAGTGTAACATCTGCAAGGAGTGCCCAATCATCGGCTTCAGATACAGAAGCCTGA
AGCACTTCAACTACGACATCTGCCAGAGCTGCTTCTTCAGCGGCAGAGTGGCCAAGGGCCACAAGATGCACTACC
CCATGGTGGAGTACTGCACCCCCACCACCAGCGGCGAGGACGTGAGAGACTTCGCAAAGGTCCTGAAGAACAAGT
TCAGAACCAAGAGATACTTCGCTAAGCACCCCAGAATGGGCTACCTGCCCGTGCAGACCGTGCTGGAGGGCGATA
ACATGGAGACCGACACCATGTGATAGATTCCAACAAAATCACTGATGCTGGAAGATCAGCAACAAAATCACTGAT
GCTGGAAGACGCAGGAATAAAATATCTTTATTTTCATTACATCTGTGTGTTGGTTTTTTGTGTGAGGAACCCCTA
GTGATGGAGTTGGCCACTCCCTCTCTGCGCGCTCGCTCGCTCACTGAGGCCGGGCGACCAAAGGTCGCCCGACGC
CCGGGCTTTGCCCGGGCGGCCTCAGTGAGCGAGCGAGCGCGC

| Nucleic acid | |
|---|---|
| cargo 3 | |
| annotated | Sequence |
| AAV2 ITR | GCGCGCTCGCTCGCTCACTGAGGCCGCCCGGGCAAAGCCCGGGCGTCGGGCGACCTTT |
| | GGTCGCCCGGCCTCAGTGAGCGAGCGAGCGCGCAGAGAGGGAGTGGCCAACTCCATCA |
| | CTAGGGGTTCCT (SEQ ID NO: 2408) |
| Novel | CGTCTGTCTAATTCCAGCCAAGGGCATGGGGGAAAGGACAGAGCCCAGGGACCTGTGG |
| promoter | CCTATTCTCTGAGAGGACGCTGGGCTAATAATAGGAGGGGAGATTAGGGAGGGATTTG |
| | ACTGCATTGTTATCTCACAGGAATGGCGTTTGAGAGCCTTGCTTCCAAGCTCTTCCAA |
| | GAGTCATGCCACCCCCCTCCAATCTCTGTGGAAGTGCCCACTGCCTTTCCCGCTTCGT |
| | TCTCTTCTCTCGGTCCCATCCCTGACCCACTAGCCTGGTGCCGGGGGGAGACCAATTT |
| | CTGGAGGAAGCTCTGGGTACCCAGTCTTGCCCTAAGCCTGCCTCTGAACAGGCTGTTC |
| | TTGTTTATGACCCCCGTCCCAGCAGAATAGTGATTGCTCATCCCTGCATGTGATTTGA |
| | GAGGGCCAGTCTTTCAGGCCTGGAGGAAACTCAAGCCCCACCAGCCGCTTGGCATCGG |
| | AATGCTCAGCTGGTCCCCTCCTGGGGCTCATGTGACCAAGATCTAGCTATAAATATCA |
| | GAGGGGCCTCAGACCAAGACAGAATTCGGGCACCAGGAGAAGGAAGCCAACAGGATCC |
| | GACCCGGTGTTTTGTGACAAAGGCAAGACCCCCAGGTCTACTTAGAGCAACGTTAGTA |
| | GAGGA (SEQ ID NO: 2404) |
| Intron | GTAAGTATCAAGGTTACAAGACAGGTTTAAGGAGACCAATAGAAACTGGGCTTGTCGA |
| | GACAGAGAAGACTCTTGCGTTTCTGATAGGCACCTATTGGTCTTACTGACATCCACTT |
| | TGCCTTTCTCTCCACAG (SEQ ID NO: 2409) |
| Codon | ATGCTGTGGTGGGAGGAAGTGGAGGACTGCTACGAGAGAGAGGACGTGCAGAAGAAGA |
| optimized | CCTTCACCAAGTGGGTGAACGCCCAGTTCAGCAAGTTCGGCAAGCAGCACATCGAGAA |
| microdystrophin | CCTGTTCAGCGACCTGCAGGACGGCAGAAGACTGCTGGACCTGCTGGAGGGCCTGACC |
| coding | GGCCAGAAGCTGCCTAAGGAGAAGGGCAGCACCAGAGTGCACGCTCTCAACAACGTGA |
| sequence | ACAAGGCCCTGAGAGTGCTGCAGAACAACAACGTGGACCTTGTGAACATCGGAAGCAC |
| | CGACATCGTGGATGGCAACCACAAGCTGACCCTGGGACTGATCTGGAACATCATCCTG |
| | CACTGGCAGGTGAAGAACGTCATGAAGAACATCATGGCCGGCCTGCAGCAGACCAACA |
| | GCGAAAAGATCCTGCTGAGCTGGGTCAGACAGAGCACCAGAAACTACCCTCAGGTGAA |
| | CGTGATCAACTTCACCACCAGCTGGAGCGACGGCCTGGCCCTGAACGCCCTGATCCAC |
| | AGCCACAGACCCGACCTGTTCGACTGGAACAGCGTGGTGTGCCAGCAGAGCGCCACCC |
| | AGAGACTGGAGCACGCCTTCAACATCGCCAGATACCAGCTGGGCATCGAGAAGCTGCT |
| | GGACCCCGAGGACGTGGATACCACCTACCCCGACAAGAAGAGCATCCTGATGTACATC |
| | ACCAGCCTGTTCCAGGTGCTGCCCCAGCAAGTGAGCATCGAGGCCATCCAGGAGGTGG |
| | AGATGCTGCCCAGACCTCCAAAGGTGACCAAGGAGGAGCACTTCCAGCTGCACCACCA |
| | GATGCACTACAGCCAGCAGATCACCGTGAGCCTGGCCCAGGGCTACGAGAGAACCAGC |
| | AGCCCCAAGCCCAGATTCAAGAGCTACGCCTACACCCAGGCCGCCTACGTGACCACCA |
| | GCGACCCCACCAGAAGCCCCTTCCCCAGCCAGCACCTGGAGGCCCCCGAGGATAAGAG |
| | CTTCGGCAGCAGCCTGATGGAGAGCGAGGTGAACTTGGACAGATACCAGACCGCCCTG |
| | GAGGAGGTGCTGAGCTGGCTGCTGAGCGCCGAGGACACCCTTCAGGCACAGGGCGAGA |
| | TCAGCAACGACGTGGAGGTGGTGAAGGACCAGTTCCACACCCACGAGGGCTACATGAT |
| | GGACCTGACCGCCCACCAGGGCAGAGTGGGTAACATCCTCCAGCTGGGAAGCAAGCTG |
| | ATCGGCACCGGCAAGCTGAGCGAGGACGAGGAGACCGAGGTGCAAGAGCAAATGAACC |
| | TGCTTAACAGCAGATGGGAGTGCCTGAGAGTGGCCAGCATGGAGAAGCAGAGCAACCT |
| | GCACAGAGTGCTGATGGACCTGCAGAACCAGAAGCTGAAGGAGCTGAACGACTGGCTG |
| | ACCAAGACCGAGGAGAGAACCAGAAAGATGGAGGAGGAGCCCCTGGGCCCGGACCTGG |
| | AGGACCTGAAGCGGCAGGTGCAGCAGCACAAGGTCTTACAGGAGGACCTGGAGCAGGA |
| | GCAAGTGAGAGTGAACAGCCTGACCCACATGGTGGTGGTGGTGGATGAGAGCAGCGGC |
| | GACCACGCCACCGCCGCCCTGGAGGAGCAGCTGAAGGTGCTGGGCGACAGATGGGCCA |
| | ACATCTGCAGATGGACCGAGGACAGATGGGTTCTGCTGCAGGACATCCTGCTGAAGTG |
| | GCAGAGACTGACCGAGGAACAGTGCCTGTTCAGCGCCTGGCTGAGTGAGAAGGAAGAC |
| | GCTGTGAACAAGATCCACACCACCGGCTTCAAGGACCAGAACGAGATGCTGAGCAGCC |
| | TGCAGAAGCTGGCCGTGCTGAAGGCAGACCTGGAGAAGAAAAAGCAGTCCATGGGAAA |
| | GCTGTACAGCCTGAAGCAAGACCTGCTGAGCACCCTGAAGAACAAGAGCGTGACCCAG |
| | AAGACCGAGGCCTGGCTGGACAACTTCGCCAGATGCTGGGACAACCTGGTTCAGAAGC |
| | TGGAGAAGAGCACCGCCCAGATCAGCCAGGCCGTGACCACCACCCAGCCCAGCCTGAC |
| | CCAGACCACCGTGATGGAGACCGTGACCACCGTGACCACCAGAGAGCAGATCCTGGTG |
| | AAGCACGCCCAGGAGGAGCTGCCCCCTCCTCCCCCGCAAAAGAAGAGAACCCTGGAGA |
| | GACTGCAGGAGCTGCAGGAGGCTACCGATGAGCTGGACCTGAAGCTGAGACAGGCCGA |
| | GGTGATCAAGGGCAGCTGGCAGCCCGTGGGTGACCTGCTTATCGACAGCCTGCAGGAC |
| | CACCTAGAGAAGGTGAAGGCCCTGAGAGGCGAGATCGCCCCTCTGAAGGAGAACGTGA |
| | GCCACGTGAACGACCTGGCCAGACAGCTGACCACCCTGGGAATCCAGCTGAGCCCCTA |
| | CAACCTGAGCACCCTGGAGGACCTGAACACGAGATGGAAGCTGCTGCAAGTGGCCGTG |
| | GAGGACAGAGTCAGACAGTTGCACGAGGCTCACAGAGATTTCGGCCCCGCTAGTCAGC |
| | ACTTCCTGAGCACCAGCGTGCAGGGCCCCTGGGAGAGAGCTATCAGCCCAAACAAGGT |
| | GCCCTACTACATCAACCACGAGACCCAGACCACCTGCTGGGACCACCCCAAGATGACC |
| | GAGCTGTACCAGAGCCTGGCAGACCTCAACAACGTGAGATTCAGCGCCTACAGAACCG |
| | CCATGAAGCTGAGAAGACTGCAGAAGGCCCTGTGCCTGGACCTGCTGAGCCTGAGCGC |
| | CGCCTGCGACGCCCTGGACCAGCACAACCTGAAGCAGAACGACCAGCCCATGGACATC |
| | CTTCAGATCATCAACTGCCTGACCACCATCTACGACAGACTGGAGCAGGAACATAACA |
| | ACCTGGTGAACGTGCCCCTGTGCGTGGACATGTGCCTGAACTGGCTGCTGAACGTGTA |
| | CGACACCGGCAGAACAGGCAGAATCAGAGTGCTGAGCTTCAAGACCGGCATCATCAGC |
| | CTGTGCAAGGCCCACCTGGAGGACAAGTACAGATACTTATTCAAGCAGGTGGCCAGCA |
| | GCACCGGCTTCTGCGATCAGAGAAGACTGGGCCTGCTGCTGCACGACAGCATCCAGAT |
| | CCCCAGACAGCTGGGCGAAGTGGCCAGCTTCGGCGGCAGCAACATCGAGCCCAGCGTG |
| | AGAAGCTGCTTCCAGTTCGCTAACAACAAGCCCGAGATCGAGGCCGCCCTGTTCTTGG |
| | ACTGGATGAGACTGGAGCCCCAGAGCATGGTGTGGCTGCCCGTGCTGCACAGAGTGGC |
| | CGCCGCCGAGACCGCCAAGCACCAGGCCAAGTGTAACATCTGCAAGGAGTGCCCAATC |
| | ATCGGCTTCAGATACAGAAGCCTGAAGCACTTCAACTACGACATCTGCCAGAGCTGCT |
| | TCTTCAGCGGCAGAGTGGCCAAGGGCCACAAGATGCACTACCCCATGGTGGAGTACTG |
| | CACCCCCACCACCAGCGGCGAGGACGTGAGAGACTTCGCAAAGGTCCTGAAGAACAAG |
| | TTCAGAACCAAGAGATACTTCGCTAAGCACCCCAGAATGGGCTACCTGCCCGTGCAGA |
| | CCGTGCTGGAGGGCGATAACATGGAGACCGACACCATGTGA (SEQ ID NO: |
| | 2405) |
| First DRG de- | CAACAAAATCACTGATGCTGGA (SEQ ID NO: 2399) |
| targeting | |
| miRNA binding | |
| site | |
| Second DRG | CAACAAAATCACTGATGCTGGA (SEQ ID NO: 2399) |
| de-targeting | |
| miRNA binding | |
| site | |
| Short polyA | AGGAATAAAATATCTTTATTTTCATTACATCTGTGTGTTGGTTTTTTGTGTG (SEQ |
| | ID NO: 2410) |
| AAV2 ITR | AGGAACCCCTAGTGATGGAGTTGGCCACTCCCTCTCTGCGCGCTCGCTCGCTCACTGA |
| | GGCCGGGCGACCAAAGGTCGCCCGACGCCCGGGCTTTGCCCGGGCGGCCTCAGTGAGC |
| | GAGCGAGCGCGC (SEQ ID NO: 2411) |

Nucleic acid 4
(SEQ ID NO: 2415)
GCGCGCTCGCTCGCTCACTGAGGCCGCCCGGGCAAAGCCCGGGCGTCGGGCGACCTTTGGTCGCCCGGCCTCAGT
GAGCGAGCGAGCGCGCAGAGAGGGAGTGGCCAACTCCATCACTAGGGGTTCCTTAGTTATTAATAGTAATCAATT
ACGGGGTCATTAGTTCATAGCCCATATATGGAGTTCCGCGTTACATAACTTACGGTAAATGGCCCGCCTGGCTGA
CCGCCCAACGACCCCCGCCCATTGACGTCAATAATGACGTATGTTCCCATAGTAACGCCAATAGGGACTTTCCAT
TGACGTCAATGGGTGGAGTATTTACGGTAAACTGCCCACTTGGCAGTACATCAAGTGTATCATATGCCAAGTACG
CCCCCTATTGACGTCAATGACGGTAAATGGCCCGCCTGGCATTATGCCCAGTACATGACCTTATGGGACTTTCCT
ACTTGGCAGTACATCTACGTATTAGTCATCGCTATTACCATGCTAGACTAGCATGCTGCCCATGTAAGGAGGCAA
GGCCTGGGGACACCCGAGATGCCTGGTTATAATTAACCCAGACATGTGGCTGCCCCCCCCCCCCAACACCTGCTG
CCTCTAAAAATAACCCTGCATGCCATGTTCCCGGCGAAGGGCCAGCTGTCCCCCGCCAGCTAGACTCAGCTCTCA
GGGGCCCCTCCCTGGGGACAGCCCCTCCTGGCTAGTCACACCCTGTAGGCTCCTCTATATAACCCAGGGGCACAG
GGGCTGCCCTCATTCTACCACCACCTCCACAGCACAGACAGACACTCAGGAGCCAGCCAGCCAGCCCAGGTACCT
GGGCAGGTAAGTATCAAGGTTACAAGACAGGTTTAAGGAGACCAATAGAAACTGGGCTTGTCGAGACAGAGAAGA
CTCTTGCGTTTCTGATAGGCACCTATTGGTCTTACTGACATCCACTTTGCCTTTCTCTCCACAGGTGTCCAGACT
AGTGCCACCATGCTGTGGTGGGAGGAAGTGGAGGACTGCTACGAGAGAGAGGACGTGCAGAAGAAGACCTTCACC
AAGTGGGTGAACGCCCAGTTCAGCAAGTTCGGCAAGCAGCACATCGAGAACCTGTTCAGCGACCTGCAGGACGGC
AGAAGACTGCTGGACCTGCTGGAGGGCCTGACCGGCCAGAAGCTGCCTAAGGAGAAGGGCAGCACCAGAGTGCAC
GCTCTCAACAACGTGAACAAGGCCCTGAGAGTGCTGCAGAACAACAACGTGGACCTTGTGAACATCGGAAGCACC
GACATCGTGGATGGCAACCACAAGCTGACCCTGGGACTGATCTGGAACATCATCCTGCACTGGCAGGTGAAGAAC
GTCATGAAGAACATCATGGCCGGCCTGCAGCAGACCAACAGCGAAAAGATCCTGCTGAGCTGGGTCAGACAGAGC
ACCAGAAACTACCCTCAGGTGAACGTGATCAACTTCACCACCAGCTGGAGCGACGGCCTGGCCCTGAACGCCCTG
ATCCACAGCCACAGACCCGACCTGTTCGACTGGAACAGCGTGGTGTGCCAGCAGAGCGCCACCCAGAGACTGGAG
CACGCCTTCAACATCGCCAGATACCAGCTGGGCATCGAGAAGCTGCTGGACCCCGAGGACGTGGATACCACCTAC
CCCGACAAGAAGAGCATCCTGATGTACATCACCAGCCTGTTCCAGGTGCTGCCCCAGCAAGTGAGCATCGAGGCC
ATCCAGGAGGTGGAGATGCTGCCCAGACCTCCAAAGGTGACCAAGGAGGAGCACTTCCAGCTGCACCACCAGATG
CACTACAGCCAGCAGATCACCGTGAGCCTGGCCCAGGGCTACGAGAGAACCAGCAGCCCCAAGCCCAGATTCAAG
AGCTACGCCTACACCCAGGCCGCCTACGTGACCACCAGCGACCCCACCAGAAGCCCCTTCCCCAGCCAGCACCTG
GAGGCCCCCGAGGATAAGAGCTTCGGCAGCAGCCTGATGGAGAGCGAGGTGAACTTGGACAGATACCAGACCGCC
CTGGAGGAGGTGCTGAGCTGGCTGCTGAGCGCCGAGGACACCCTTCAGGCACAGGGCGAGATCAGCAACGACGTG
GAGGTGGTGAAGGACCAGTTCCACACCCACGAGGGCTACATGATGGACCTGACCGCCCACCAGGGCAGAGTGGGT
AACATCCTCCAGCTGGGAAGCAAGCTGATCGGCACCGGCAAGCTGAGCGAGGACGAGGAGACCGAGGTGCAAGAG
CAAATGAACCTGCTTAACAGCAGATGGGAGTGCCTGAGAGTGGCCAGCATGGAGAAGCAGAGCAACCTGCACAGA
GTGCTGATGGACCTGCAGAACCAGAAGCTGAAGGAGCTGAACGACTGGCTGACCAAGACCGAGGAGAGAACCAGA
AAGATGGAGGAGGAGCCCCTGGGCCCGGACCTGGAGGACCTGAAGCGGCAGGTGCAGCAGCACAAGGTCTTACAG
GAGGACCTGGAGCAGGAGCAAGTGAGAGTGAACAGCCTGACCCACATGGTGGTGGTGGTGGATGAGAGCAGCGGC
GACCACGCCACCGCCGCCCTGGAGGAGCAGCTGAAGGTGCTGGGCGACAGATGGGCCAACATCTGCAGATGGACC
GAGGACAGATGGGTTCTGCTGCAGGACATCCTGCTGAAGTGGCAGAGACTGACCGAGGAACAGTGCCTGTTCAGC
GCCTGGCTGAGTGAGAAGGAAGACGCTGTGAACAAGATCCACACCACCGGCTTCAAGGACCAGAACGAGATGCTG
AGCAGCCTGCAGAAGCTGGCCGTGCTGAAGGCAGACCTGGAGAAGAAAAAGCAGTCCATGGGAAAGCTGTACAGC
CTGAAGCAAGACCTGCTGAGCACCCTGAAGAACAAGAGCGTGACCCAGAAGACCGAGGCCTGGCTGGACAACTTC
GCCAGATGCTGGGACAACCTGGTTCAGAAGCTGGAGAAGAGCACCGCCCAGATCAGCCAGGCCGTGACCACCACC
CAGCCCAGCCTGACCCAGACCACCGTGATGGAGACCGTGACCACCGTGACCACCAGAGAGCAGATCCTGGTGAAG
CACGCCCAGGAGGAGCTGCCCCCTCCTCCCCCGCAAAAGAAGAGAACCCTGGAGAGACTGCAGGAGCTGCAGGAG
GCTACCGATGAGCTGGACCTGAAGCTGAGACAGGCCGAGGTGATCAAGGGCAGCTGGCAGCCCGTGGGTGACCTG
CTTATCGACAGCCTGCAGGACCACCTAGAGAAGGTGAAGGCCCTGAGAGGCGAGATCGCCCCTCTGAAGGAGAAC
GTGAGCCACGTGAACGACCTGGCCAGACAGCTGACCACCCTGGGAATCCAGCTGAGCCCCTACAACCTGAGCACC
CTGGAGGACCTGAACACGAGATGGAAGCTGCTGCAAGTGGCCGTGGAGGACAGAGTCAGACAGTTGCACGAGGCT
CACAGAGATTTCGGCCCCGCTAGTCAGCACTTCCTGAGCACCAGCGTGCAGGGCCCCTGGGAGAGAGCTATCAGC
CCAAACAAGGTGCCCTACTACATCAACCACGAGACCCAGACCACCTGCTGGGACCACCCCAAGATGACCGAGCTG
TACCAGAGCCTGGCAGACCTCAACAACGTGAGATTCAGCGCCTACAGAACCGCCATGAAGCTGAGAAGACTGCAG
AAGGCCCTGTGCCTGGACCTGCTGAGCCTGAGCGCCGCCTGCGACGCCCTGGACCAGCACAACCTGAAGCAGAAC
GACCAGCCCATGGACATCCTTCAGATCATCAACTGCCTGACCACCATCTACGACAGACTGGAGCAGGAACATAAC
AACCTGGTGAACGTGCCCCTGTGCGTGGACATGTGCCTGAACTGGCTGCTGAACGTGTACGACACCGGCAGAACA
GGCAGAATCAGAGTGCTGAGCTTCAAGACCGGCATCATCAGCCTGTGCAAGGCCCACCTGGAGGACAAGTACAGA
TACTTATTCAAGCAGGTGGCCAGCAGCACCGGCTTCTGCGATCAGAGAAGACTGGGCCTGCTGCTGCACGACAGC
ATCCAGATCCCCAGACAGCTGGGCGAAGTGGCCAGCTTCGGCGGCAGCAACATCGAGCCCAGCGTGAGAAGCTGC
TTCCAGTTCGCTAACAACAAGCCCGAGATCGAGGCCGCCCTGTTCTTGGACTGGATGAGACTGGAGCCCCAGAGC
ATGGTGTGGCTGCCCGTGCTGCACAGAGTGGCCGCCGCCGAGACCGCCAAGCACCAGGCCAAGTGTAACATCTGC
AAGGAGTGCCCAATCATCGGCTTCAGATACAGAAGCCTGAAGCACTTCAACTACGACATCTGCCAGAGCTGCTTC
TTCAGCGGCAGAGTGGCCAAGGGCCACAAGATGCACTACCCCATGGTGGAGTACTGCACCCCCACCACCAGCGGC
GAGGACGTGAGAGACTTCGCAAAGGTCCTGAAGAACAAGTTCAGAACCAAGAGATACTTCGCTAAGCACCCCAGA
ATGGGCTACCTGCCCGTGCAGACCGTGCTGGAGGGCGATAACATGGAGACCGACACCATGTGATAGATTCCGGCC
TGATTCACAACACCAGCTAGATCAGCGGCCTGATTCACAACACCAGCTAGACGCAGGAATAAAATATCTTTATTT
TCATTACATCTGTGTGTTGGTTTTTTGTGTGAGGAACCCCTAGTGATGGAGTTGGCCACTCCCTCTCTGCGCGCT
CGCTCGCTCACTGAGGCCGGGCGACCAAAGGTCGCCCGACGCCCGGGCTTTGCCCGGGCGGCCTCAGTGAGCGAG
CGAGCGCGC

| Nucleic acid | |
|---|---|
| 4 cargo | |
| annotated | Sequence |
| AAV2 ITR | GCGCGCTCGCTCGCTCACTGAGGCCGCCCGGGCAAAGCCCGGGCGTCGGGCGACCTT |
| | TGGTCGCCCGGCCTCAGTGAGCGAGCGAGCGCGCAGAGAGGGAGTGGCCAACTCCAT |
| | CACTAGGGGTTCCT (SEQ ID NO: 2408) |
| Novel | TAGTTATTAATAGTAATCAATTACGGGGTCATTAGTTCATAGCCCATATATGGAGTT |
| promoter | CCGCGTTACATAACTTACGGTAAATGGCCCGCCTGGCTGACCGCCCAACGACCCCCG |
| | CCCATTGACGTCAATAATGACGTATGTTCCCATAGTAACGCCAATAGGGACTTTCCA |
| | TTGACGTCAATGGGTGGAGTATTTACGGTAAACTGCCCACTTGGCAGTACATCAAGT |
| | GTATCATATGCCAAGTACGCCCCCTATTGACGTCAATGACGGTAAATGGCCCGCCTG |
| | GCATTATGCCCAGTACATGACCTTATGGGACTTTCCTACTTGGCAGTACATCTACGT |
| | ATTAGTCATCGCTATTACCATGCTAGACTAGCATGCTGCCCATGTAAGGAGGCAAGG |
| | CCTGGGGACACCCGAGATGCCTGGTTATAATTAACCCAGACATGTGGCTGCCCCCCC |
| | CCCCCAACACCTGCTGCCTCTAAAAATAACCCTGCATGCCATGTTCCCGGCGAAGGG |
| | CCAGCTGTCCCCCGCCAGCTAGACTCAGCTCTCAGGGGCCCCTCCCTGGGGACAGCC |
| | CCTCCTGGCTAGTCACACCCTGTAGGCTCCTCTATATAACCCAGGGGCACAGGGGCT |
| | GCCCTCATTCTACCACCACCTCCACAGCACAGACAGACACTCAGGAGCCAGCCAGC |
| | (SEQ ID NO: 2402) |
| Intron | GTAAGTATCAAGGTTACAAGACAGGTTTAAGGAGACCAATAGAAACTGGGCTTGTCG |
| | AGACAGAGAAGACTCTTGCGTTTCTGATAGGCACCTATTGGTCTTACTGACATCCAC |
| | TTTGCCTTTCTCTCCACAG (SEQ ID NO: 2409) |
| Codon | ATGCTGTGGTGGGAGGAAGTGGAGGACTGCTACGAGAGAGAGGACGTGCAGAAGAAG |
| optimized | ACCTTCACCAAGTGGGTGAACGCCCAGTTCAGCAAGTTCGGCAAGCAGCACATCGAG |
| microdystrophin | AACCTGTTCAGCGACCTGCAGGACGGCAGAAGACTGCTGGACCTGCTGGAGGGCCTG |
| coding | ACCGGCCAGAAGCTGCCTAAGGAGAAGGGCAGCACCAGAGTGCACGCTCTCAACAAC |
| sequence | GTGAACAAGGCCCTGAGAGTGCTGCAGAACAACAACGTGGACCTTGTGAACATCGGA |
| | AGCACCGACATCGTGGATGGCAACCACAAGCTGACCCTGGGACTGATCTGGAACATC |
| | ATCCTGCACTGGCAGGTGAAGAACGTCATGAAGAACATCATGGCCGGCCTGCAGCAG |
| | ACCAACAGCGAAAAGATCCTGCTGAGCTGGGTCAGACAGAGCACCAGAAACTACCCT |
| | CAGGTGAACGTGATCAACTTCACCACCAGCTGGAGCGACGGCCTGGCCCTGAACGCC |
| | CTGATCCACAGCCACAGACCCGACCTGTTCGACTGGAACAGCGTGGTGTGCCAGCAG |
| | AGCGCCACCCAGAGACTGGAGCACGCCTTCAACATCGCCAGATACCAGCTGGGCATC |
| | GAGAAGCTGCTGGACCCCGAGGACGTGGATACCACCTACCCCGACAAGAAGAGCATC |
| | CTGATGTACATCACCAGCCTGTTCCAGGTGCTGCCCCAGCAAGTGAGCATCGAGGCC |
| | ATCCAGGAGGTGGAGATGCTGCCCAGACCTCCAAAGGTGACCAAGGAGGAGCACTTC |
| | CAGCTGCACCACCAGATGCACTACAGCCAGCAGATCACCGTGAGCCTGGCCCAGGGC |
| | TACGAGAGAACCAGCAGCCCCAAGCCCAGATTCAAGAGCTACGCCTACACCCAGGCC |
| | GCCTACGTGACCACCAGCGACCCCACCAGAAGCCCCTTCCCCAGCCAGCACCTGGAG |
| | GCCCCCGAGGATAAGAGCTTCGGCAGCAGCCTGATGGAGAGCGAGGTGAACTTGGAC |
| | AGATACCAGACCGCCCTGGAGGAGGTGCTGAGCTGGCTGCTGAGCGCCGAGGACACC |
| | CTTCAGGCACAGGGCGAGATCAGCAACGACGTGGAGGTGGTGAAGGACCAGTTCCAC |
| | ACCCACGAGGGCTACATGATGGACCTGACCGCCCACCAGGGCAGAGTGGGTAACATC |
| | CTCCAGCTGGGAAGCAAGCTGATCGGCACCGGCAAGCTGAGCGAGGACGAGGAGACC |
| | GAGGTGCAAGAGCAAATGAACCTGCTTAACAGCAGATGGGAGTGCCTGAGAGTGGCC |
| | AGCATGGAGAAGCAGAGCAACCTGCACAGAGTGCTGATGGACCTGCAGAACCAGAAG |
| | CTGAAGGAGCTGAACGACTGGCTGACCAAGACCGAGGAGAGAACCAGAAAGATGGAG |
| | GAGGAGCCCCTGGGCCCGGACCTGGAGGACCTGAAGCGGCAGGTGCAGCAGCACAAG |
| | GTCTTACAGGAGGACCTGGAGCAGGAGCAAGTGAGAGTGAACAGCCTGACCCACATG |
| | GTGGTGGTGGTGGATGAGAGCAGCGGCGACCACGCCACCGCCGCCCTGGAGGAGCAG |
| | CTGAAGGTGCTGGGCGACAGATGGGCCAACATCTGCAGATGGACCGAGGACAGATGG |
| | GTTCTGCTGCAGGACATCCTGCTGAAGTGGCAGAGACTGACCGAGGAACAGTGCCTG |
| | TTCAGCGCCTGGCTGAGTGAGAAGGAAGACGCTGTGAACAAGATCCACACCACCGGC |
| | TTCAAGGACCAGAACGAGATGCTGAGCAGCCTGCAGAAGCTGGCCGTGCTGAAGGCA |
| | GACCTGGAGAAGAAAAAGCAGTCCATGGGAAAGCTGTACAGCCTGAAGCAAGACCTG |
| | CTGAGCACCCTGAAGAACAAGAGCGTGACCCAGAAGACCGAGGCCTGGCTGGACAAC |
| | TTCGCCAGATGCTGGGACAACCTGGTTCAGAAGCTGGAGAAGAGCACCGCCCAGATC |
| | AGCCAGGCCGTGACCACCACCCAGCCCAGCCTGACCCAGACCACCGTGATGGAGACC |
| | GTGACCACCGTGACCACCAGAGAGCAGATCCTGGTGAAGCACGCCCAGGAGGAGCTG |
| | CCCCCTCCTCCCCCGCAAAAGAAGAGAACCCTGGAGAGACTGCAGGAGCTGCAGGAG |
| | GCTACCGATGAGCTGGACCTGAAGCTGAGACAGGCCGAGGTGATCAAGGGCAGCTGG |
| | CAGCCCGTGGGTGACCTGCTTATCGACAGCCTGCAGGACCACCTAGAGAAGGTGAAG |
| | GCCCTGAGAGGCGAGATCGCCCCTCTGAAGGAGAACGTGAGCCACGTGAACGACCTG |
| | GCCAGACAGCTGACCACCCTGGGAATCCAGCTGAGCCCCTACAACCTGAGCACCCTG |
| | GAGGACCTGAACACGAGATGGAAGCTGCTGCAAGTGGCCGTGGAGGACAGAGTCAGA |
| | CAGTTGCACGAGGCTCACAGAGATTTCGGCCCCGCTAGTCAGCACTTCCTGAGCACC |
| | AGCGTGCAGGGCCCCTGGGAGAGAGCTATCAGCCCAAACAAGGTGCCCTACTACATC |
| | AACCACGAGACCCAGACCACCTGCTGGGACCACCCCAAGATGACCGAGCTGTACCAG |
| | AGCCTGGCAGACCTCAACAACGTGAGATTCAGCGCCTACAGAACCGCCATGAAGCTG |
| | AGAAGACTGCAGAAGGCCCTGTGCCTGGACCTGCTGAGCCTGAGCGCCGCCTGCGAC |
| | GCCCTGGACCAGCACAACCTGAAGCAGAACGACCAGCCCATGGACATCCTTCAGATC |
| | ATCAACTGCCTGACCACCATCTACGACAGACTGGAGCAGGAACATAACAACCTGGTG |
| | AACGTGCCCCTGTGCGTGGACATGTGCCTGAACTGGCTGCTGAACGTGTACGACACC |
| | GGCAGAACAGGCAGAATCAGAGTGCTGAGCTTCAAGACCGGCATCATCAGCCTGTGC |
| | AAGGCCCACCTGGAGGACAAGTACAGATACTTATTCAAGCAGGTGGCCAGCAGCACC |
| | GGCTTCTGCGATCAGAGAAGACTGGGCCTGCTGCTGCACGACAGCATCCAGATCCCC |
| | AGACAGCTGGGCGAAGTGGCCAGCTTCGGCGGCAGCAACATCGAGCCCAGCGTGAGA |
| | AGCTGCTTCCAGTTCGCTAACAACAAGCCCGAGATCGAGGCCGCCCTGTTCTTGGAC |
| | TGGATGAGACTGGAGCCCCAGAGCATGGTGTGGCTGCCCGTGCTGCACAGAGTGGCC |
| | GCCGCCGAGACCGCCAAGCACCAGGCCAAGTGTAACATCTGCAAGGAGTGCCCAATC |
| | ATCGGCTTCAGATACAGAAGCCTGAAGCACTTCAACTACGACATCTGCCAGAGCTGC |
| | TTCTTCAGCGGCAGAGTGGCCAAGGGCCACAAGATGCACTACCCCATGGTGGAGTAC |
| | TGCACCCCCACCACCAGCGGCGAGGACGTGAGAGACTTCGCAAAGGTCCTGAAGAAC |
| | AAGTTCAGAACCAAGAGATACTTCGCTAAGCACCCCAGAATGGGCTACCTGCCCGTG |
| | CAGACCGTGCTGGAGGGCGATAACATGGAGACCGACACCATGTGA (SEQ ID NO: |
| | 2405) |
| First DRG de- | CGGCCTGATTCACAACACCAGCT (SEQ ID NO: 2400) |
| targeting | |
| miRNA binding | |
| site | |
| Second DRG | CGGCCTGATTCACAACACCAGCT (SEQ ID NO: 2400) |
| de-targeting | |
| miRNA binding | |
| site | |
| Short polyA | AGGAATAAAATATCTTTATTTTCATTACATCTGTGTGTTGGTTTTTTGTGTG (SEQ |
| | ID NO: 2410) |
| AAV2 ITR | AGGAACCCCTAGTGATGGAGTTGGCCACTCCCTCTCTGCGCGCTCGCTCGCTCACTG |
| | AGGCCGGGCGACCAAAGGTCGCCCGACGCCCGGGCTTTGCCCGGGCGGCCTCAGTGA |
| | GCGAGCGAGCGCGC (SEQ ID NO: 2411) |

Nucleic acid 5
(SEQ ID NO: 2412)
GCGCGCTCGCTCGCTCACTGAGGCCGCCCGGGCAAAGCCCGGGCGTCGGGCGACCTTTGGTCGCCCGGCCTCAGT
GAGCGAGCGAGCGCGCAGAGAGGGAGTGGCCAACTCCATCACTAGGGGTTCCTCGTCTGTCTAATTCCAGCCAAG
GGCATGGGGGAAAGGACAGAGCCCAGGGACCTGTGGCCTATTCTCTGAGAGGACGCTGGGCTAATAATAGGAGGG
GAGATTAGGGAGGGATTTGACTGCATTGTTATCTCACAGGAATGGCGTTTGAGAGCCTTGCTTCCAAGCTCTTCC
AAGAGTCATGCCACCCCCCTCCAATCTCTGTGGAAGTGCCCACTGCCTTTCCCGCTTCGTTCTCTTCTCTCTAAA
TCTGAGCCCACCCCACTCAGGGGTACAGGATCTGGTTCATTTATCTCCCAGAATGATGCCTTGGGTTGCGTCCCC
TCTAAACTCTGGCACATTCCAGCCCCTCTTTGGGAGAAAGAACATCTCTTCTTGCCCAGGCCCTAGTGAGACATG
CATCGCAAGACATGCTCCCCCCTTCCTCCCCGCTGGGCTCCAGCTGCTGCCAGCCCTCCAAGAAAGGAGAGGCCC
TGAGTTGGGCTATTTTGGTATCTGGGGTGGGCACCCGCAGGGCTAAGGTTACCTTGGTATGTTAAGGGCTCCCTG
GGGCAGGACTATATAACCCCAGAGGGACTGCCCCATGCTGACTCCTTGCTTCTTTCCTGCTCGAGCCGCTGCCTT
GCCCCCCGGAGACTGAAGACACAGCCCAGGTACCTGGGCAGGTAAGTATCAAGGTTACAAGACAGGTTTAAGGAG
ACCAATAGAAACTGGGCTTGTCGAGACAGAGAAGACTCTTGCGTTTCTGATAGGCACCTATTGGTCTTACTGACA
TCCACTTTGCCTTTCTCTCCACAGGTGTCCAGACTAGTGCCACCATGCTGTGGTGGGAGGAAGTGGAGGACTGCT
ACGAGAGAGAGGACGTGCAGAAGAAGACCTTCACCAAGTGGGTGAACGCCCAGTTCAGCAAGTTCGGCAAGCAGC
ACATCGAGAACCTGTTCAGCGACCTGCAGGACGGCAGAAGACTGCTGGACCTGCTGGAGGGCCTGACCGGCCAGA
AGCTGCCTAAGGAGAAGGGCAGCACCAGAGTGCACGCTCTCAACAACGTGAACAAGGCCCTGAGAGTGCTGCAGA
ACAACAACGTGGACCTTGTGAACATCGGAAGCACCGACATCGTGGATGGCAACCACAAGCTGACCCTGGGACTGA
TCTGGAACATCATCCTGCACTGGCAGGTGAAGAACGTCATGAAGAACATCATGGCCGGCCTGCAGCAGACCAACA
GCGAAAAGATCCTGCTGAGCTGGGTCAGACAGAGCACCAGAAACTACCCTCAGGTGAACGTGATCAACTTCACCA
CCAGCTGGAGCGACGGCCTGGCCCTGAACGCCCTGATCCACAGCCACAGACCCGACCTGTTCGACTGGAACAGCG
TGGTGTGCCAGCAGAGCGCCACCCAGAGACTGGAGCACGCCTTCAACATCGCCAGATACCAGCTGGGCATCGAGA
AGCTGCTGGACCCCGAGGACGTGGATACCACCTACCCCGACAAGAAGAGCATCCTGATGTACATCACCAGCCTGT
TCCAGGTGCTGCCCCAGCAAGTGAGCATCGAGGCCATCCAGGAGGTGGAGATGCTGCCCAGACCTCCAAAGGTGA
CCAAGGAGGAGCACTTCCAGCTGCACCACCAGATGCACTACAGCCAGCAGATCACCGTGAGCCTGGCCCAGGGCT
ACGAGAGAACCAGCAGCCCCAAGCCCAGATTCAAGAGCTACGCCTACACCCAGGCCGCCTACGTGACCACCAGCG
ACCCCACCAGAAGCCCCTTCCCCAGCCAGCACCTGGAGGCCCCCGAGGATAAGAGCTTCGGCAGCAGCCTGATGG
AGAGCGAGGTGAACTTGGACAGATACCAGACCGCCCTGGAGGAGGTGCTGAGCTGGCTGCTGAGCGCCGAGGACA
CCCTTCAGGCACAGGGCGAGATCAGCAACGACGTGGAGGTGGTGAAGGACCAGTTCCACACCCACGAGGGCTACA
TGATGGACCTGACCGCCCACCAGGGCAGAGTGGGTAACATCCTCCAGCTGGGAAGCAAGCTGATCGGCACCGGCA
AGCTGAGCGAGGACGAGGAGACCGAGGTGCAAGAGCAAATGAACCTGCTTAACAGCAGATGGGAGTGCCTGAGAG
TGGCCAGCATGGAGAAGCAGAGCAACCTGCACAGAGTGCTGATGGACCTGCAGAACCAGAAGCTGAAGGAGCTGA
ACGACTGGCTGACCAAGACCGAGGAGAGAACCAGAAAGATGGAGGAGGAGCCCCTGGGCCCGGACCTGGAGGACC
TGAAGCGGCAGGTGCAGCAGCACAAGGTCTTACAGGAGGACCTGGAGCAGGAGCAAGTGAGAGTGAACAGCCTGA
CCCACATGGTGGTGGTGGTGGATGAGAGCAGCGGCGACCACGCCACCGCCGCCCTGGAGGAGCAGCTGAAGGTGC
TGGGCGACAGATGGGCCAACATCTGCAGATGGACCGAGGACAGATGGGTTCTGCTGCAGGACATCCTGCTGAAGT
GGCAGAGACTGACCGAGGAACAGTGCCTGTTCAGCGCCTGGCTGAGTGAGAAGGAAGACGCTGTGAACAAGATCC
ACACCACCGGCTTCAAGGACCAGAACGAGATGCTGAGCAGCCTGCAGAAGCTGGCCGTGCTGAAGGCAGACCTGG
AGAAGAAAAAGCAGTCCATGGGAAAGCTGTACAGCCTGAAGCAAGACCTGCTGAGCACCCTGAAGAACAAGAGCG
TGACCCAGAAGACCGAGGCCTGGCTGGACAACTTCGCCAGATGCTGGGACAACCTGGTTCAGAAGCTGGAGAAGA
GCACCGCCCAGATCAGCCAGGCCGTGACCACCACCCAGCCCAGCCTGACCCAGACCACCGTGATGGAGACCGTGA
CCACCGTGACCACCAGAGAGCAGATCCTGGTGAAGCACGCCCAGGAGGAGCTGCCCCCTCCTCCCCCGCAAAAGA
AGAGAACCCTGGAGAGACTGCAGGAGCTGCAGGAGGCTACCGATGAGCTGGACCTGAAGCTGAGACAGGCCGAGG
TGATCAAGGGCAGCTGGCAGCCCGTGGGTGACCTGCTTATCGACAGCCTGCAGGACCACCTAGAGAAGGTGAAGG
CCCTGAGAGGCGAGATCGCCCCTCTGAAGGAGAACGTGAGCCACGTGAACGACCTGGCCAGACAGCTGACCACCC
TGGGAATCCAGCTGAGCCCCTACAACCTGAGCACCCTGGAGGACCTGAACACGAGATGGAAGCTGCTGCAAGTGG
CCGTGGAGGACAGAGTCAGACAGTTGCACGAGGCTCACAGAGATTTCGGCCCCGCTAGTCAGCACTTCCTGAGCA
CCAGCGTGCAGGGCCCCTGGGAGAGAGCTATCAGCCCAAACAAGGTGCCCTACTACATCAACCACGAGACCCAGA
CCACCTGCTGGGACCACCCCAAGATGACCGAGCTGTACCAGAGCCTGGCAGACCTCAACAACGTGAGATTCAGCG
CCTACAGAACCGCCATGAAGCTGAGAAGACTGCAGAAGGCCCTGTGCCTGGACCTGCTGAGCCTGAGCGCCGCCT
GCGACGCCCTGGACCAGCACAACCTGAAGCAGAACGACCAGCCCATGGACATCCTTCAGATCATCAACTGCCTGA
CCACCATCTACGACAGACTGGAGCAGGAACATAACAACCTGGTGAACGTGCCCCTGTGCGTGGACATGTGCCTGA
ACTGGCTGCTGAACGTGTACGACACCGGCAGAACAGGCAGAATCAGAGTGCTGAGCTTCAAGACCGGCATCATCA
GCCTGTGCAAGGCCCACCTGGAGGACAAGTACAGATACTTATTCAAGCAGGTGGCCAGCAGCACCGGCTTCTGCG
ATCAGAGAAGACTGGGCCTGCTGCTGCACGACAGCATCCAGATCCCCAGACAGCTGGGCGAAGTGGCCAGCTTCG
GCGGCAGCAACATCGAGCCCAGCGTGAGAAGCTGCTTCCAGTTCGCTAACAACAAGCCCGAGATCGAGGCCGCCC
TGTTCTTGGACTGGATGAGACTGGAGCCCCAGAGCATGGTGTGGCTGCCCGTGCTGCACAGAGTGGCCGCCGCCG
AGACCGCCAAGCACCAGGCCAAGTGTAACATCTGCAAGGAGTGCCCAATCATCGGCTTCAGATACAGAAGCCTGA
AGCACTTCAACTACGACATCTGCCAGAGCTGCTTCTTCAGCGGCAGAGTGGCCAAGGGCCACAAGATGCACTACC
CCATGGTGGAGTACTGCACCCCCACCACCAGCGGCGAGGACGTGAGAGACTTCGCAAAGGTCCTGAAGAACAAGT
TCAGAACCAAGAGATACTTCGCTAAGCACCCCAGAATGGGCTACCTGCCCGTGCAGACCGTGCTGGAGGGCGATA
ACATGGAGACCGACACCATGTGATAGATTCCGGCCTGATTCACAACACCAGCTAGATCAGCGGCCTGATTCACAA
CACCAGCTAGACGCAGGAATAAAATATCTTTATTTTCATTACATCTGTGTGTTGGTTTTTTGTGTGAGGAACCCC
TAGTGATGGAGTTGGCCACTCCCTCTCTGCGCGCTCGCTCGCTCACTGAGGCCGGGCGACCAAAGGTCGCCCGAC
GCCCGGGCTTTGCCCGGGCGGCCTCAGTGAGCGAGCGAGCGCGC

| Nucleic acid | |
|---|---|
| cargo 5 | |
| annotated | Sequence |
| AAV2 ITR | GCGCGCTCGCTCGCTCACTGAGGCCGCCCGGGCAAAGCCCGGGCGTCGGGCGACCTT |
| | TGGTCGCCCGGCCTCAGTGAGCGAGCGAGCGCGCAGAGAGGGAGTGGCCAACTCCAT |
| | CACTAGGGGTTCCT (SEQ ID NO: 2408) |
| Novel | CGTCTGTCTAATTCCAGCCAAGGGCATGGGGGAAAGGACAGAGCCCAGGGACCTGTG |
| promoter | GCCTATTCTCTGAGAGGACGCTGGGCTAATAATAGGAGGGGAGATTAGGGAGGGATT |
| | TGACTGCATTGTTATCTCACAGGAATGGCGTTTGAGAGCCTTGCTTCCAAGCTCTTC |
| | CAAGAGTCATGCCACCCCCCTCCAATCTCTGTGGAAGTGCCCACTGCCTTTCCCGCT |
| | TCGTTCTCTTCTCTCTAAATCTGAGCCCACCCCACTCAGGGGTACAGGATCTGGTTC |
| | ATTTATCTCCCAGAATGATGCCTTGGGTTGCGTCCCCTCTAAACTCTGGCACATTCC |
| | AGCCCCTCTTTGGGAGAAAGAACATCTCTTCTTGCCCAGGCCCTAGTGAGACATGCA |
| | TCGCAAGACATGCTCCCCCCTTCCTCCCCGCTGGGCTCCAGCTGCTGCCAGCCCTCC |
| | AAGAAAGGAGAGGCCCTGAGTTGGGCTATTTTGGTATCTGGGGTGGGCACCCGCAGG |
| | GCTAAGGTTACCTTGGTATGTTAAGGGCTCCCTGGGGCAGGACTATATAACCCCAGA |
| | GGGACTGCCCCATGCTGACTCCTTGCTTCTTTCCTGCTCGAGCCGCTGCCTTGCCCC |
| | CCGGAGACTGAAGACA (SEQ ID NO: 2403) |
| Intron | GTAAGTATCAAGGTTACAAGACAGGTTTAAGGAGACCAATAGAAACTGGGCTTGTCG |
| | AGACAGAGAAGACTCTTGCGTTTCTGATAGGCACCTATTGGTCTTACTGACATCCAC |
| | TTTGCCTTTCTCTCCACAG (SEQ ID NO: 2409) |
| Codon | ATGCTGTGGTGGGAGGAAGTGGAGGACTGCTACGAGAGAGAGGACGTGCAGAAGAAG |
| optimized | ACCTTCACCAAGTGGGTGAACGCCCAGTTCAGCAAGTTCGGCAAGCAGCACATCGAG |
| microdystrophin | AACCTGTTCAGCGACCTGCAGGACGGCAGAAGACTGCTGGACCTGCTGGAGGGCCTG |
| coding | ACCGGCCAGAAGCTGCCTAAGGAGAAGGGCAGCACCAGAGTGCACGCTCTCAACAAC |
| sequence | GTGAACAAGGCCCTGAGAGTGCTGCAGAACAACAACGTGGACCTTGTGAACATCGGA |
| | AGCACCGACATCGTGGATGGCAACCACAAGCTGACCCTGGGACTGATCTGGAACATC |
| | ATCCTGCACTGGCAGGTGAAGAACGTCATGAAGAACATCATGGCCGGCCTGCAGCAG |
| | ACCAACAGCGAAAAGATCCTGCTGAGCTGGGTCAGACAGAGCACCAGAAACTACCCT |
| | CAGGTGAACGTGATCAACTTCACCACCAGCTGGAGCGACGGCCTGGCCCTGAACGCC |
| | CTGATCCACAGCCACAGACCCGACCTGTTCGACTGGAACAGCGTGGTGTGCCAGCAG |
| | AGCGCCACCCAGAGACTGGAGCACGCCTTCAACATCGCCAGATACCAGCTGGGCATC |
| | GAGAAGCTGCTGGACCCCGAGGACGTGGATACCACCTACCCCGACAAGAAGAGCATC |
| | CTGATGTACATCACCAGCCTGTTCCAGGTGCTGCCCCAGCAAGTGAGCATCGAGGCC |
| | ATCCAGGAGGTGGAGATGCTGCCCAGACCTCCAAAGGTGACCAAGGAGGAGCACTTC |
| | CAGCTGCACCACCAGATGCACTACAGCCAGCAGATCACCGTGAGCCTGGCCCAGGGC |
| | TACGAGAGAACCAGCAGCCCCAAGCCCAGATTCAAGAGCTACGCCTACACCCAGGCC |
| | GCCTACGTGACCACCAGCGACCCCACCAGAAGCCCCTTCCCCAGCCAGCACCTGGAG |
| | GCCCCCGAGGATAAGAGCTTCGGCAGCAGCCTGATGGAGAGCGAGGTGAACTTGGAC |
| | AGATACCAGACCGCCCTGGAGGAGGTGCTGAGCTGGCTGCTGAGCGCCGAGGACACC |
| | CTTCAGGCACAGGGCGAGATCAGCAACGACGTGGAGGTGGTGAAGGACCAGTTCCAC |
| | ACCCACGAGGGCTACATGATGGACCTGACCGCCCACCAGGGCAGAGTGGGTAACATC |
| | CTCCAGCTGGGAAGCAAGCTGATCGGCACCGGCAAGCTGAGCGAGGACGAGGAGACC |
| | GAGGTGCAAGAGCAAATGAACCTGCTTAACAGCAGATGGGAGTGCCTGAGAGTGGCC |
| | AGCATGGAGAAGCAGAGCAACCTGCACAGAGTGCTGATGGACCTGCAGAACCAGAAG |
| | CTGAAGGAGCTGAACGACTGGCTGACCAAGACCGAGGAGAGAACCAGAAAGATGGAG |
| | GAGGAGCCCCTGGGCCCGGACCTGGAGGACCTGAAGCGGCAGGTGCAGCAGCACAAG |
| | GTCTTACAGGAGGACCTGGAGCAGGAGCAAGTGAGAGTGAACAGCCTGACCCACATG |
| | GTGGTGGTGGTGGATGAGAGCAGCGGCGACCACGCCACCGCCGCCCTGGAGGAGCAG |
| | CTGAAGGTGCTGGGCGACAGATGGGCCAACATCTGCAGATGGACCGAGGACAGATGG |
| | GTTCTGCTGCAGGACATCCTGCTGAAGTGGCAGAGACTGACCGAGGAACAGTGCCTG |
| | TTCAGCGCCTGGCTGAGTGAGAAGGAAGACGCTGTGAACAAGATCCACACCACCGGC |
| | TTCAAGGACCAGAACGAGATGCTGAGCAGCCTGCAGAAGCTGGCCGTGCTGAAGGCA |
| | GACCTGGAGAAGAAAAAGCAGTCCATGGGAAAGCTGTACAGCCTGAAGCAAGACCTG |
| | CTGAGCACCCTGAAGAACAAGAGCGTGACCCAGAAGACCGAGGCCTGGCTGGACAAC |
| | TTCGCCAGATGCTGGGACAACCTGGTTCAGAAGCTGGAGAAGAGCACCGCCCAGATC |
| | AGCCAGGCCGTGACCACCACCCAGCCCAGCCTGACCCAGACCACCGTGATGGAGACC |
| | GTGACCACCGTGACCACCAGAGAGCAGATCCTGGTGAAGCACGCCCAGGAGGAGCTG |
| | CCCCCTCCTCCCCCGCAAAAGAAGAGAACCCTGGAGAGACTGCAGGAGCTGCAGGAG |
| | GCTACCGATGAGCTGGACCTGAAGCTGAGACAGGCCGAGGTGATCAAGGGCAGCTGG |
| | CAGCCCGTGGGTGACCTGCTTATCGACAGCCTGCAGGACCACCTAGAGAAGGTGAAG |
| | GCCCTGAGAGGCGAGATCGCCCCTCTGAAGGAGAACGTGAGCCACGTGAACGACCTG |
| | GCCAGACAGCTGACCACCCTGGGAATCCAGCTGAGCCCCTACAACCTGAGCACCCTG |
| | GAGGACCTGAACACGAGATGGAAGCTGCTGCAAGTGGCCGTGGAGGACAGAGTCAGA |
| | CAGTTGCACGAGGCTCACAGAGATTTCGGCCCCGCTAGTCAGCACTTCCTGAGCACC |
| | AGCGTGCAGGGCCCCTGGGAGAGAGCTATCAGCCCAAACAAGGTGCCCTACTACATC |
| | AACCACGAGACCCAGACCACCTGCTGGGACCACCCCAAGATGACCGAGCTGTACCAG |
| | AGCCTGGCAGACCTCAACAACGTGAGATTCAGCGCCTACAGAACCGCCATGAAGCTG |
| | AGAAGACTGCAGAAGGCCCTGTGCCTGGACCTGCTGAGCCTGAGCGCCGCCTGCGAC |
| | GCCCTGGACCAGCACAACCTGAAGCAGAACGACCAGCCCATGGACATCCTTCAGATC |
| | ATCAACTGCCTGACCACCATCTACGACAGACTGGAGCAGGAACATAACAACCTGGTG |
| | AACGTGCCCCTGTGCGTGGACATGTGCCTGAACTGGCTGCTGAACGTGTACGACACC |
| | GGCAGAACAGGCAGAATCAGAGTGCTGAGCTTCAAGACCGGCATCATCAGCCTGTGC |
| | AAGGCCCACCTGGAGGACAAGTACAGATACTTATTCAAGCAGGTGGCCAGCAGCACC |
| | GGCTTCTGCGATCAGAGAAGACTGGGCCTGCTGCTGCACGACAGCATCCAGATCCCC |
| | AGACAGCTGGGCGAAGTGGCCAGCTTCGGCGGCAGCAACATCGAGCCCAGCGTGAGA |
| | AGCTGCTTCCAGTTCGCTAACAACAAGCCCGAGATCGAGGCCGCCCTGTTCTTGGAC |
| | TGGATGAGACTGGAGCCCCAGAGCATGGTGTGGCTGCCCGTGCTGCACAGAGTGGCC |
| | GCCGCCGAGACCGCCAAGCACCAGGCCAAGTGTAACATCTGCAAGGAGTGCCCAATC |
| | ATCGGCTTCAGATACAGAAGCCTGAAGCACTTCAACTACGACATCTGCCAGAGCTGC |
| | TTCTTCAGCGGCAGAGTGGCCAAGGGCCACAAGATGCACTACCCCATGGTGGAGTAC |
| | TGCACCCCCACCACCAGCGGCGAGGACGTGAGAGACTTCGCAAAGGTCCTGAAGAAC |
| | AAGTTCAGAACCAAGAGATACTTCGCTAAGCACCCCAGAATGGGCTACCTGCCCGTG |
| | CAGACCGTGCTGGAGGGCGATAACATGGAGACCGACACCATGTGA (SEQ ID NO: |
| | 2405) |
| First DRG de- | CAACAAAATCACTGATGCTGGA (SEQ ID NO: 2400) |
| targeting | |
| miRNA binding | |
| site | |
| Second DRG | CAACAAAATCACTGATGCTGGA (SEQ ID NO: 2400) |
| de-targeting | |
| miRNA binding | |
| site | |
| Short polyA | AGGAATAAAATATCTTTATTTTCATTACATCTGTGTGTTGGTTTTTTGTGTG (SEQ |
| | ID NO: 2410) |
| AAV2 ITR | AGGAACCCCTAGTGATGGAGTTGGCCACTCCCTCTCTGCGCGCTCGCTCGCTCACTG |
| | AGGCCGGGCGACCAAAGGTCGCCCGACGCCCGGGCTTTGCCCGGGCGGCCTCAGTGA |
| | GCGAGCGAGCGCGC (SEQ ID NO: 2411) |

Nucleic acid 6
(SEQ ID NO: 2417)
GCGCGCTCGCTCGCTCACTGAGGCCGCCCGGGCAAAGCCCGGGCGTCGGGCGACCTTTGGTCGCCCGGCCTCAGT
GAGCGAGCGAGCGCGCAGAGAGGGAGTGGCCAACTCCATCACTAGGGGTTCCTCGTCTGTCTAATTCCAGCCAAG
GGCATGGGGGAAAGGACAGAGCCCAGGGACCTGTGGCCTATTCTCTGAGAGGACGCTGGGCTAATAATAGGAGGG
GAGATTAGGGAGGGATTTGACTGCATTGTTATCTCACAGGAATGGCGTTTGAGAGCCTTGCTTCCAAGCTCTTCC
AAGAGTCATGCCACCCCCCTCCAATCTCTGTGGAAGTGCCCACTGCCTTTCCCGCTTCGTTCTCTTCTCTCGGTC
CCATCCCTGACCCACTAGCCTGGTGCCGGGGGGAGACCAATTTCTGGAGGAAGCTCTGGGTACCCAGTCTTGCCC
TAAGCCTGCCTCTGAACAGGCTGTTCTTGTTTATGACCCCCGTCCCAGCAGAATAGTGATTGCTCATCCCTGCAT
GTGATTTGAGAGGGCCAGTCTTTCAGGCCTGGAGGAAACTCAAGCCCCACCAGCCGCTTGGCATCGGAATGCTCA
GCTGGTCCCCTCCTGGGGCTCATGTGACCAAGATCTAGCTATAAATATCAGAGGGGCCTCAGACCAAGACAGAAT
TCGGGCACCAGGAGAAGGAAGCCAACAGGATCCGACCCGGTGTTTTGTGACAAAGGCAAGACCCCCAGGTCTACT
TAGAGCAACGTTAGTAGAGGACAGCCCAGGTACCTGGGCAGGTAAGTATCAAGGTTACAAGACAGGTTTAAGGAG
ACCAATAGAAACTGGGCTTGTCGAGACAGAGAAGACTCTTGCGTTTCTGATAGGCACCTATTGGTCTTACTGACA
TCCACTTTGCCTTTCTCTCCACAGGTGTCCAGACTAGTGCCACCATGCTGTGGTGGGAGGAAGTGGAGGACTGCT
ACGAGAGAGAGGACGTGCAGAAGAAGACCTTCACCAAGTGGGTGAACGCCCAGTTCAGCAAGTTCGGCAAGCAGC
ACATCGAGAACCTGTTCAGCGACCTGCAGGACGGCAGAAGACTGCTGGACCTGCTGGAGGGCCTGACCGGCCAGA
AGCTGCCTAAGGAGAAGGGCAGCACCAGAGTGCACGCTCTCAACAACGTGAACAAGGCCCTGAGAGTGCTGCAGA
ACAACAACGTGGACCTTGTGAACATCGGAAGCACCGACATCGTGGATGGCAACCACAAGCTGACCCTGGGACTGA
TCTGGAACATCATCCTGCACTGGCAGGTGAAGAACGTCATGAAGAACATCATGGCCGGCCTGCAGCAGACCAACA
GCGAAAAGATCCTGCTGAGCTGGGTCAGACAGAGCACCAGAAACTACCCTCAGGTGAACGTGATCAACTTCACCA
CCAGCTGGAGCGACGGCCTGGCCCTGAACGCCCTGATCCACAGCCACAGACCCGACCTGTTCGACTGGAACAGCG
TGGTGTGCCAGCAGAGCGCCACCCAGAGACTGGAGCACGCCTTCAACATCGCCAGATACCAGCTGGGCATCGAGA
AGCTGCTGGACCCCGAGGACGTGGATACCACCTACCCCGACAAGAAGAGCATCCTGATGTACATCACCAGCCTGT
TCCAGGTGCTGCCCCAGCAAGTGAGCATCGAGGCCATCCAGGAGGTGGAGATGCTGCCCAGACCTCCAAAGGTGA
CCAAGGAGGAGCACTTCCAGCTGCACCACCAGATGCACTACAGCCAGCAGATCACCGTGAGCCTGGCCCAGGGCT
ACGAGAGAACCAGCAGCCCCAAGCCCAGATTCAAGAGCTACGCCTACACCCAGGCCGCCTACGTGACCACCAGCG
ACCCCACCAGAAGCCCCTTCCCCAGCCAGCACCTGGAGGCCCCCGAGGATAAGAGCTTCGGCAGCAGCCTGATGG
AGAGCGAGGTGAACTTGGACAGATACCAGACCGCCCTGGAGGAGGTGCTGAGCTGGCTGCTGAGCGCCGAGGACA
CCCTTCAGGCACAGGGCGAGATCAGCAACGACGTGGAGGTGGTGAAGGACCAGTTCCACACCCACGAGGGCTACA
TGATGGACCTGACCGCCCACCAGGGCAGAGTGGGTAACATCCTCCAGCTGGGAAGCAAGCTGATCGGCACCGGCA
AGCTGAGCGAGGACGAGGAGACCGAGGTGCAAGAGCAAATGAACCTGCTTAACAGCAGATGGGAGTGCCTGAGAG
TGGCCAGCATGGAGAAGCAGAGCAACCTGCACAGAGTGCTGATGGACCTGCAGAACCAGAAGCTGAAGGAGCTGA
ACGACTGGCTGACCAAGACCGAGGAGAGAACCAGAAAGATGGAGGAGGAGCCCCTGGGCCCGGACCTGGAGGACC
TGAAGCGGCAGGTGCAGCAGCACAAGGTCTTACAGGAGGACCTGGAGCAGGAGCAAGTGAGAGTGAACAGCCTGA
CCCACATGGTGGTGGTGGTGGATGAGAGCAGCGGCGACCACGCCACCGCCGCCCTGGAGGAGCAGCTGAAGGTGC
TGGGCGACAGATGGGCCAACATCTGCAGATGGACCGAGGACAGATGGGTTCTGCTGCAGGACATCCTGCTGAAGT
GGCAGAGACTGACCGAGGAACAGTGCCTGTTCAGCGCCTGGCTGAGTGAGAAGGAAGACGCTGTGAACAAGATCC
ACACCACCGGCTTCAAGGACCAGAACGAGATGCTGAGCAGCCTGCAGAAGCTGGCCGTGCTGAAGGCAGACCTGG
AGAAGAAAAAGCAGTCCATGGGAAAGCTGTACAGCCTGAAGCAAGACCTGCTGAGCACCCTGAAGAACAAGAGCG
TGACCCAGAAGACCGAGGCCTGGCTGGACAACTTCGCCAGATGCTGGGACAACCTGGTTCAGAAGCTGGAGAAGA
GCACCGCCCAGATCAGCCAGGCCGTGACCACCACCCAGCCCAGCCTGACCCAGACCACCGTGATGGAGACCGTGA
CCACCGTGACCACCAGAGAGCAGATCCTGGTGAAGCACGCCCAGGAGGAGCTGCCCCCTCCTCCCCCGCAAAAGA
AGAGAACCCTGGAGAGACTGCAGGAGCTGCAGGAGGCTACCGATGAGCTGGACCTGAAGCTGAGACAGGCCGAGG
TGATCAAGGGCAGCTGGCAGCCCGTGGGTGACCTGCTTATCGACAGCCTGCAGGACCACCTAGAGAAGGTGAAGG
CCCTGAGAGGCGAGATCGCCCCTCTGAAGGAGAACGTGAGCCACGTGAACGACCTGGCCAGACAGCTGACCACCC
TGGGAATCCAGCTGAGCCCCTACAACCTGAGCACCCTGGAGGACCTGAACACGAGATGGAAGCTGCTGCAAGTGG
CCGTGGAGGACAGAGTCAGACAGTTGCACGAGGCTCACAGAGATTTCGGCCCCGCTAGTCAGCACTTCCTGAGCA
CCAGCGTGCAGGGCCCCTGGGAGAGAGCTATCAGCCCAAACAAGGTGCCCTACTACATCAACCACGAGACCCAGA
CCACCTGCTGGGACCACCCCAAGATGACCGAGCTGTACCAGAGCCTGGCAGACCTCAACAACGTGAGATTCAGCG
CCTACAGAACCGCCATGAAGCTGAGAAGACTGCAGAAGGCCCTGTGCCTGGACCTGCTGAGCCTGAGCGCCGCCT
GCGACGCCCTGGACCAGCACAACCTGAAGCAGAACGACCAGCCCATGGACATCCTTCAGATCATCAACTGCCTGA
CCACCATCTACGACAGACTGGAGCAGGAACATAACAACCTGGTGAACGTGCCCCTGTGCGTGGACATGTGCCTGA
ACTGGCTGCTGAACGTGTACGACACCGGCAGAACAGGCAGAATCAGAGTGCTGAGCTTCAAGACCGGCATCATCA
GCCTGTGCAAGGCCCACCTGGAGGACAAGTACAGATACTTATTCAAGCAGGTGGCCAGCAGCACCGGCTTCTGCG
ATCAGAGAAGACTGGGCCTGCTGCTGCACGACAGCATCCAGATCCCCAGACAGCTGGGCGAAGTGGCCAGCTTCG
GCGGCAGCAACATCGAGCCCAGCGTGAGAAGCTGCTTCCAGTTCGCTAACAACAAGCCCGAGATCGAGGCCGCCC
TGTTCTTGGACTGGATGAGACTGGAGCCCCAGAGCATGGTGTGGCTGCCCGTGCTGCACAGAGTGGCCGCCGCCG
AGACCGCCAAGCACCAGGCCAAGTGTAACATCTGCAAGGAGTGCCCAATCATCGGCTTCAGATACAGAAGCCTGA
AGCACTTCAACTACGACATCTGCCAGAGCTGCTTCTTCAGCGGCAGAGTGGCCAAGGGCCACAAGATGCACTACC
CCATGGTGGAGTACTGCACCCCCACCACCAGCGGCGAGGACGTGAGAGACTTCGCAAAGGTCCTGAAGAACAAGT
TCAGAACCAAGAGATACTTCGCTAAGCACCCCAGAATGGGCTACCTGCCCGTGCAGACCGTGCTGGAGGGCGATA
ACATGGAGACCGACACCATGTGATAGATTCCGGCCTGATTCACAACACCAGCTAGATCAGCGGCCTGATTCACAA
CACCAGCTAGACGCAGGAATAAAATATCTTTATTTTCATTACATCTGTGTGTTGGTTTTTTGTGTGAGGAACCCC
TAGTGATGGAGTTGGCCACTCCCTCTCTGCGCGCTCGCTCGCTCACTGAGGCCGGGCGACCAAAGGTCGCCCGAC
GCCCGGGCTTTGCCCGGGCGGCCTCAGTGAGCGAGCGAGCGCGC

| Nucleic acid | |
|---|---|
| cargo 6 | |
| annotated | Sequence |
| AAV2 ITR | GCGCGCTCGCTCGCTCACTGAGGCCGCCCGGGCAAAGCCCGGGCGTCGGGCGACCTT |
| | TGGTCGCCCGGCCTCAGTGAGCGAGCGAGCGCGCAGAGAGGGAGTGGCCAACTCCAT |
| | CACTAGGGGTTCCT (SEQ ID NO: 2408) |
| Novel | CGTCTGTCTAATTCCAGCCAAGGGCATGGGGGAAAGGACAGAGCCCAGGGACCTGTG |
| promoter | GCCTATTCTCTGAGAGGACGCTGGGCTAATAATAGGAGGGGAGATTAGGGAGGGATT |
| | TGACTGCATTGTTATCTCACAGGAATGGCGTTTGAGAGCCTTGCTTCCAAGCTCTTC |
| | CAAGAGTCATGCCACCCCCCTCCAATCTCTGTGGAAGTGCCCACTGCCTTTCCCGCT |
| | TCGTTCTCTTCTCTCGGTCCCATCCCTGACCCACTAGCCTGGTGCCGGGGGGAGACC |
| | AATTTCTGGAGGAAGCTCTGGGTACCCAGTCTTGCCCTAAGCCTGCCTCTGAACAGG |
| | CTGTTCTTGTTTATGACCCCCGTCCCAGCAGAATAGTGATTGCTCATCCCTGCATGT |
| | GATTTGAGAGGGCCAGTCTTTCAGGCCTGGAGGAAACTCAAGCCCCACCAGCCGCTT |
| | GGCATCGGAATGCTCAGCTGGTCCCCTCCTGGGGCTCATGTGACCAAGATCTAGCTA |
| | TAAATATCAGAGGGGCCTCAGACCAAGACAGAATTCGGGCACCAGGAGAAGGAAGCC |
| | AACAGGATCCGACCCGGTGTTTTGTGACAAAGGCAAGACCCCCAGGTCTACTTAGAG |
| | CAACGTTAGTAGAGGA (SEQ ID NO: 2404) |
| Intron | GTAAGTATCAAGGTTACAAGACAGGTTTAAGGAGACCAATAGAAACTGGGCTTGTCG |
| | AGACAGAGAAGACTCTTGCGTTTCTGATAGGCACCTATTGGTCTTACTGACATCCAC |
| | TTTGCCTTTCTCTCCACAG (SEQ ID NO: 2409) |
| Codon | ATGCTGTGGTGGGAGGAAGTGGAGGACTGCTACGAGAGAGAGGACGTGCAGAAGAAG |
| optimized | ACCTTCACCAAGTGGGTGAACGCCCAGTTCAGCAAGTTCGGCAAGCAGCACATCGAG |
| microdystroph | AACCTGTTCAGCGACCTGCAGGACGGCAGAAGACTGCTGGACCTGCTGGAGGGCCTG |
| in coding | ACCGGCCAGAAGCTGCCTAAGGAGAAGGGCAGCACCAGAGTGCACGCTCTCAACAAC |
| sequence | GTGAACAAGGCCCTGAGAGTGCTGCAGAACAACAACGTGGACCTTGTGAACATCGGA |
| | AGCACCGACATCGTGGATGGCAACCACAAGCTGACCCTGGGACTGATCTGGAACATC |
| | ATCCTGCACTGGCAGGTGAAGAACGTCATGAAGAACATCATGGCCGGCCTGCAGCAG |
| | ACCAACAGCGAAAAGATCCTGCTGAGCTGGGTCAGACAGAGCACCAGAAACTACCCT |
| | CAGGTGAACGTGATCAACTTCACCACCAGCTGGAGCGACGGCCTGGCCCTGAACGCC |
| | CTGATCCACAGCCACAGACCCGACCTGTTCGACTGGAACAGCGTGGTGTGCCAGCAG |
| | AGCGCCACCCAGAGACTGGAGCACGCCTTCAACATCGCCAGATACCAGCTGGGCATC |
| | GAGAAGCTGCTGGACCCCGAGGACGTGGATACCACCTACCCCGACAAGAAGAGCATC |
| | CTGATGTACATCACCAGCCTGTTCCAGGTGCTGCCCCAGCAAGTGAGCATCGAGGCC |
| | ATCCAGGAGGTGGAGATGCTGCCCAGACCTCCAAAGGTGACCAAGGAGGAGCACTTC |
| | CAGCTGCACCACCAGATGCACTACAGCCAGCAGATCACCGTGAGCCTGGCCCAGGGC |
| | TACGAGAGAACCAGCAGCCCCAAGCCCAGATTCAAGAGCTACGCCTACACCCAGGCC |
| | GCCTACGTGACCACCAGCGACCCCACCAGAAGCCCCTTCCCCAGCCAGCACCTGGAG |
| | GCCCCCGAGGATAAGAGCTTCGGCAGCAGCCTGATGGAGAGCGAGGTGAACTTGGAC |
| | AGATACCAGACCGCCCTGGAGGAGGTGCTGAGCTGGCTGCTGAGCGCCGAGGACACC |
| | CTTCAGGCACAGGGCGAGATCAGCAACGACGTGGAGGTGGTGAAGGACCAGTTCCAC |
| | ACCCACGAGGGCTACATGATGGACCTGACCGCCCACCAGGGCAGAGTGGGTAACATC |
| | CTCCAGCTGGGAAGCAAGCTGATCGGCACCGGCAAGCTGAGCGAGGACGAGGAGACC |
| | GAGGTGCAAGAGCAAATGAACCTGCTTAACAGCAGATGGGAGTGCCTGAGAGTGGCC |
| | AGCATGGAGAAGCAGAGCAACCTGCACAGAGTGCTGATGGACCTGCAGAACCAGAAG |
| | CTGAAGGAGCTGAACGACTGGCTGACCAAGACCGAGGAGAGAACCAGAAAGATGGAG |
| | GAGGAGCCCCTGGGCCCGGACCTGGAGGACCTGAAGCGGCAGGTGCAGCAGCACAAG |
| | GTCTTACAGGAGGACCTGGAGCAGGAGCAAGTGAGAGTGAACAGCCTGACCCACATG |
| | GTGGTGGTGGTGGATGAGAGCAGCGGCGACCACGCCACCGCCGCCCTGGAGGAGCAG |
| | CTGAAGGTGCTGGGCGACAGATGGGCCAACATCTGCAGATGGACCGAGGACAGATGG |
| | GTTCTGCTGCAGGACATCCTGCTGAAGTGGCAGAGACTGACCGAGGAACAGTGCCTG |
| | TTCAGCGCCTGGCTGAGTGAGAAGGAAGACGCTGTGAACAAGATCCACACCACCGGC |
| | TTCAAGGACCAGAACGAGATGCTGAGCAGCCTGCAGAAGCTGGCCGTGCTGAAGGCA |
| | GACCTGGAGAAGAAAAAGCAGTCCATGGGAAAGCTGTACAGCCTGAAGCAAGACCTG |
| | CTGAGCACCCTGAAGAACAAGAGCGTGACCCAGAAGACCGAGGCCTGGCTGGACAAC |
| | TTCGCCAGATGCTGGGACAACCTGGTTCAGAAGCTGGAGAAGAGCACCGCCCAGATC |
| | AGCCAGGCCGTGACCACCACCCAGCCCAGCCTGACCCAGACCACCGTGATGGAGACC |
| | GTGACCACCGTGACCACCAGAGAGCAGATCCTGGTGAAGCACGCCCAGGAGGAGCTG |
| | CCCCCTCCTCCCCCGCAAAAGAAGAGAACCCTGGAGAGACTGCAGGAGCTGCAGGAG |
| | GCTACCGATGAGCTGGACCTGAAGCTGAGACAGGCCGAGGTGATCAAGGGCAGCTGG |
| | CAGCCCGTGGGTGACCTGCTTATCGACAGCCTGCAGGACCACCTAGAGAAGGTGAAG |
| | GCCCTGAGAGGCGAGATCGCCCCTCTGAAGGAGAACGTGAGCCACGTGAACGACCTG |
| | GCCAGACAGCTGACCACCCTGGGAATCCAGCTGAGCCCCTACAACCTGAGCACCCTG |
| | GAGGACCTGAACACGAGATGGAAGCTGCTGCAAGTGGCCGTGGAGGACAGAGTCAGA |
| | CAGTTGCACGAGGCTCACAGAGATTTCGGCCCCGCTAGTCAGCACTTCCTGAGCACC |
| | AGCGTGCAGGGCCCCTGGGAGAGAGCTATCAGCCCAAACAAGGTGCCCTACTACATC |
| | AACCACGAGACCCAGACCACCTGCTGGGACCACCCCAAGATGACCGAGCTGTACCAG |
| | AGCCTGGCAGACCTCAACAACGTGAGATTCAGCGCCTACAGAACCGCCATGAAGCTG |
| | AGAAGACTGCAGAAGGCCCTGTGCCTGGACCTGCTGAGCCTGAGCGCCGCCTGCGAC |
| | GCCCTGGACCAGCACAACCTGAAGCAGAACGACCAGCCCATGGACATCCTTCAGATC |
| | ATCAACTGCCTGACCACCATCTACGACAGACTGGAGCAGGAACATAACAACCTGGTG |
| | AACGTGCCCCTGTGCGTGGACATGTGCCTGAACTGGCTGCTGAACGTGTACGACACC |
| | GGCAGAACAGGCAGAATCAGAGTGCTGAGCTTCAAGACCGGCATCATCAGCCTGTGC |
| | AAGGCCCACCTGGAGGACAAGTACAGATACTTATTCAAGCAGGTGGCCAGCAGCACC |
| | GGCTTCTGCGATCAGAGAAGACTGGGCCTGCTGCTGCACGACAGCATCCAGATCCCC |
| | AGACAGCTGGGCGAAGTGGCCAGCTTCGGCGGCAGCAACATCGAGCCCAGCGTGAGA |
| | AGCTGCTTCCAGTTCGCTAACAACAAGCCCGAGATCGAGGCCGCCCTGTTCTTGGAC |
| | TGGATGAGACTGGAGCCCCAGAGCATGGTGTGGCTGCCCGTGCTGCACAGAGTGGCC |
| | GCCGCCGAGACCGCCAAGCACCAGGCCAAGTGTAACATCTGCAAGGAGTGCCCAATC |
| | ATCGGCTTCAGATACAGAAGCCTGAAGCACTTCAACTACGACATCTGCCAGAGCTGC |
| | TTCTTCAGCGGCAGAGTGGCCAAGGGCCACAAGATGCACTACCCCATGGTGGAGTAC |
| | TGCACCCCCACCACCAGCGGCGAGGACGTGAGAGACTTCGCAAAGGTCCTGAAGAAC |
| | AAGTTCAGAACCAAGAGATACTTCGCTAAGCACCCCAGAATGGGCTACCTGCCCGTG |
| | CAGACCGTGCTGGAGGGCGATAACATGGAGACCGACACCATGTGA (SEQ ID NO: |
| | 2405) |
| First DRG de- | CGGCCTGATTCACAACACCAGCT (SEQ ID NO: 2400) |
| targeting | |
| miRNA binding | |
| site | |
| Second DRG | CGGCCTGATTCACAACACCAGCT (SEQ ID NO: 2400) |
| de-targeting | |
| miRNA binding | |
| site | |
| Short polyA | AGGAATAAAATATCTTTATTTTCATTACATCTGTGTGTTGGTTTTTTGTGTG (SEQ |
| | ID NO: 2410) |
| AAV2 ITR | AGGAACCCCTAGTGATGGAGTTGGCCACTCCCTCTCTGCGCGCTCGCTCGCTCACTG |
| | AGGCCGGGCGACCAAAGGTCGCCCGACGCCCGGGCTTTGCCCGGGCGGCCTCAGTGA |
| | GCGAGCGAGCGCGC (SEQ ID NO: 2411) |

Nucleic acid 7
(SEQ ID NO: 2418)
GCGCGCTCGCTCGCTCACTGAGGCCGCCCGGGCAAAGCCCGGGCGTCGGGCGACCTTTGGTCGCCCGGCCTCAGT
GAGCGAGCGAGCGCGCAGAGAGGGAGTGGCCAACTCCATCACTAGGGGTTCCTTAGTTATTAATAGTAATCAATT
ACGGGGTCATTAGTTCATAGCCCATATATGGAGTTCCGCGTTACATAACTTACGGTAAATGGCCCGCCTGGCTGA
CCGCCCAACGACCCCCGCCCATTGACGTCAATAATGACGTATGTTCCCATAGTAACGCCAATAGGGACTTTCCAT
TGACGTCAATGGGTGGAGTATTTACGGTAAACTGCCCACTTGGCAGTACATCAAGTGTATCATATGCCAAGTACG
CCCCCTATTGACGTCAATGACGGTAAATGGCCCGCCTGGCATTATGCCCAGTACATGACCTTATGGGACTTTCCT
ACTTGGCAGTACATCTACGTATTAGTCATCGCTATTACCATGCTAGACTAGCATGCTGCCCATGTAAGGAGGCAA
GGCCTGGGGACACCCGAGATGCCTGGTTATAATTAACCCAGACATGTGGCTGCCCCCCCCCCCCAACACCTGCTG
CCTCTAAAAATAACCCTGCATGCCATGTTCCCGGCGAAGGGCCAGCTGTCCCCCGCCAGCTAGACTCAGCTCTCA
GGGGCCCCTCCCTGGGGACAGCCCCTCCTGGCTAGTCACACCCTGTAGGCTCCTCTATATAACCCAGGGGCACAG
GGGCTGCCCTCATTCTACCACCACCTCCACAGCACAGACAGACACTCAGGAGCCAGCCAGCCAGCCCAGGTACCT
GGGCAGGTAAGTATCAAGGTTACAAGACAGGTTTAAGGAGACCAATAGAAACTGGGCTTGTCGAGACAGAGAAGA
CTCTTGCGTTTCTGATAGGCACCTATTGGTCTTACTGACATCCACTTTGCCTTTCTCTCCACAGGTGTCCAGACT
AGTGCCACCATGCTGTGGTGGGAGGAAGTGGAGGACTGCTACGAGAGAGAGGACGTGCAGAAGAAGACCTTCACC
AAGTGGGTGAACGCCCAGTTCAGCAAGTTCGGCAAGCAGCACATCGAGAACCTGTTCAGCGACCTGCAGGACGGC
AGAAGACTGCTGGACCTGCTGGAGGGCCTGACCGGCCAGAAGCTGCCTAAGGAGAAGGGCAGCACCAGAGTGCAC
GCTCTCAACAACGTGAACAAGGCCCTGAGAGTGCTGCAGAACAACAACGTGGACCTTGTGAACATCGGAAGCACC
GACATCGTGGATGGCAACCACAAGCTGACCCTGGGACTGATCTGGAACATCATCCTGCACTGGCAGGTGAAGAAC
GTCATGAAGAACATCATGGCCGGCCTGCAGCAGACCAACAGCGAAAAGATCCTGCTGAGCTGGGTCAGACAGAGC
ACCAGAAACTACCCTCAGGTGAACGTGATCAACTTCACCACCAGCTGGAGCGACGGCCTGGCCCTGAACGCCCTG
ATCCACAGCCACAGACCCGACCTGTTCGACTGGAACAGCGTGGTGTGCCAGCAGAGCGCCACCCAGAGACTGGAG
CACGCCTTCAACATCGCCAGATACCAGCTGGGCATCGAGAAGCTGCTGGACCCCGAGGACGTGGATACCACCTAC
CCCGACAAGAAGAGCATCCTGATGTACATCACCAGCCTGTTCCAGGTGCTGCCCCAGCAAGTGAGCATCGAGGCC
ATCCAGGAGGTGGAGATGCTGCCCAGACCTCCAAAGGTGACCAAGGAGGAGCACTTCCAGCTGCACCACCAGATG
CACTACAGCCAGCAGATCACCGTGAGCCTGGCCCAGGGCTACGAGAGAACCAGCAGCCCCAAGCCCAGATTCAAG
AGCTACGCCTACACCCAGGCCGCCTACGTGACCACCAGCGACCCCACCAGAAGCCCCTTCCCCAGCCAGCACCTG
GAGGCCCCCGAGGATAAGAGCTTCGGCAGCAGCCTGATGGAGAGCGAGGTGAACTTGGACAGATACCAGACCGCC
CTGGAGGAGGTGCTGAGCTGGCTGCTGAGCGCCGAGGACACCCTTCAGGCACAGGGCGAGATCAGCAACGACGTG
GAGGTGGTGAAGGACCAGTTCCACACCCACGAGGGCTACATGATGGACCTGACCGCCCACCAGGGCAGAGTGGGT
AACATCCTCCAGCTGGGAAGCAAGCTGATCGGCACCGGCAAGCTGAGCGAGGACGAGGAGACCGAGGTGCAAGAG
CAAATGAACCTGCTTAACAGCAGATGGGAGTGCCTGAGAGTGGCCAGCATGGAGAAGCAGAGCAACCTGCACAGA
GTGCTGATGGACCTGCAGAACCAGAAGCTGAAGGAGCTGAACGACTGGCTGACCAAGACCGAGGAGAGAACCAGA
AAGATGGAGGAGGAGCCCCTGGGCCCGGACCTGGAGGACCTGAAGCGGCAGGTGCAGCAGCACAAGGTCTTACAG
GAGGACCTGGAGCAGGAGCAAGTGAGAGTGAACAGCCTGACCCACATGGTGGTGGTGGTGGATGAGAGCAGCGGC
GACCACGCCACCGCCGCCCTGGAGGAGCAGCTGAAGGTGCTGGGCGACAGATGGGCCAACATCTGCAGATGGACC
GAGGACAGATGGGTTCTGCTGCAGGACATCCTGCTGAAGTGGCAGAGACTGACCGAGGAACAGTGCCTGTTCAGC
GCCTGGCTGAGTGAGAAGGAAGACGCTGTGAACAAGATCCACACCACCGGCTTCAAGGACCAGAACGAGATGCTG
AGCAGCCTGCAGAAGCTGGCCGTGCTGAAGGCAGACCTGGAGAAGAAAAAGCAGTCCATGGGAAAGCTGTACAGC
CTGAAGCAAGACCTGCTGAGCACCCTGAAGAACAAGAGCGTGACCCAGAAGACCGAGGCCTGGCTGGACAACTTC
GCCAGATGCTGGGACAACCTGGTTCAGAAGCTGGAGAAGAGCACCGCCCAGATCAGCCAGGCCGTGACCACCACC
CAGCCCAGCCTGACCCAGACCACCGTGATGGAGACCGTGACCACCGTGACCACCAGAGAGCAGATCCTGGTGAAG
CACGCCCAGGAGGAGCTGCCCCCTCCTCCCCCGCAAAAGAAGAGAACCCTGGAGAGACTGCAGGAGCTGCAGGAG
GCTACCGATGAGCTGGACCTGAAGCTGAGACAGGCCGAGGTGATCAAGGGCAGCTGGCAGCCCGTGGGTGACCTG
CTTATCGACAGCCTGCAGGACCACCTAGAGAAGGTGAAGGCCCTGAGAGGCGAGATCGCCCCTCTGAAGGAGAAC
GTGAGCCACGTGAACGACCTGGCCAGACAGCTGACCACCCTGGGAATCCAGCTGAGCCCCTACAACCTGAGCACC
CTGGAGGACCTGAACACGAGATGGAAGCTGCTGCAAGTGGCCGTGGAGGACAGAGTCAGACAGTTGCACGAGGCT
CACAGAGATTTCGGCCCCGCTAGTCAGCACTTCCTGAGCACCAGCGTGCAGGGCCCCTGGGAGAGAGCTATCAGC
CCAAACAAGGTGCCCTACTACATCAACCACGAGACCCAGACCACCTGCTGGGACCACCCCAAGATGACCGAGCTG
TACCAGAGCCTGGCAGACCTCAACAACGTGAGATTCAGCGCCTACAGAACCGCCATGAAGCTGAGAAGACTGCAG
AAGGCCCTGTGCCTGGACCTGCTGAGCCTGAGCGCCGCCTGCGACGCCCTGGACCAGCACAACCTGAAGCAGAAC
GACCAGCCCATGGACATCCTTCAGATCATCAACTGCCTGACCACCATCTACGACAGACTGGAGCAGGAACATAAC
AACCTGGTGAACGTGCCCCTGTGCGTGGACATGTGCCTGAACTGGCTGCTGAACGTGTACGACACCGGCAGAACA
GGCAGAATCAGAGTGCTGAGCTTCAAGACCGGCATCATCAGCCTGTGCAAGGCCCACCTGGAGGACAAGTACAGA
TACTTATTCAAGCAGGTGGCCAGCAGCACCGGCTTCTGCGATCAGAGAAGACTGGGCCTGCTGCTGCACGACAGC
ATCCAGATCCCCAGACAGCTGGGCGAAGTGGCCAGCTTCGGCGGCAGCAACATCGAGCCCAGCGTGAGAAGCTGC
TTCCAGTTCGCTAACAACAAGCCCGAGATCGAGGCCGCCCTGTTCTTGGACTGGATGAGACTGGAGCCCCAGAGC
ATGGTGTGGCTGCCCGTGCTGCACAGAGTGGCCGCCGCCGAGACCGCCAAGCACCAGGCCAAGTGTAACATCTGC
AAGGAGTGCCCAATCATCGGCTTCAGATACAGAAGCCTGAAGCACTTCAACTACGACATCTGCCAGAGCTGCTTC
TTCAGCGGCAGAGTGGCCAAGGGCCACAAGATGCACTACCCCATGGTGGAGTACTGCACCCCCACCACCAGCGGC
GAGGACGTGAGAGACTTCGCAAAGGTCCTGAAGAACAAGTTCAGAACCAAGAGATACTTCGCTAAGCACCCCAGA
ATGGGCTACCTGCCCGTGCAGACCGTGCTGGAGGGCGATAACATGGAGACCGACACCATGTGATAGATTCTCATA
CAGCTAGATAACCAAAGAAGATCAGTCATACAGCTAGATAACCAAAGAAGACGCAGGAATAAAATATCTTTATTT
TCATTACATCTGTGTGTTGGTTTTTTGTGTGAGGAACCCCTAGTGATGGAGTTGGCCACTCCCTCTCTGCGCGCT
CGCTCGCTCACTGAGGCCGGGCGACCAAAGGTCGCCCGACGCCCGGGCTTTGCCCGGGCGGCCTCAGTGAGCGAG
CGAGCGCGC

| Nucleic acid | |
|---|---|
| cargo 7 | |
| annotated | Sequence |
| AAV2 ITR | GCGCGCTCGCTCGCTCACTGAGGCCGCCCGGGCAAAGCCCGGGCGTCGGGCGACCTTT |
| | GGTCGCCCGGCCTCAGTGAGCGAGCGAGCGCGCAGAGAGGGAGTGGCCAACTCCATCA |
| | CTAGGGGTTCCT (SEQ ID NO: 2408) |
| Novel | TAGTTATTAATAGTAATCAATTACGGGGTCATTAGTTCATAGCCCATATATGGAGTTC |
| promoter | CGCGTTACATAACTTACGGTAAATGGCCCGCCTGGCTGACCGCCCAACGACCCCCGCC |
| | CATTGACGTCAATAATGACGTATGTTCCCATAGTAACGCCAATAGGGACTTTCCATTG |
| | ACGTCAATGGGTGGAGTATTTACGGTAAACTGCCCACTTGGCAGTACATCAAGTGTAT |
| | CATATGCCAAGTACGCCCCCTATTGACGTCAATGACGGTAAATGGCCCGCCTGGCATT |
| | ATGCCCAGTACATGACCTTATGGGACTTTCCTACTTGGCAGTACATCTACGTATTAGT |
| | CATCGCTATTACCATGCTAGACTAGCATGCTGCCCATGTAAGGAGGCAAGGCCTGGGG |
| | ACACCCGAGATGCCTGGTTATAATTAACCCAGACATGTGGCTGCCCCCCCCCCCCAAC |
| | ACCTGCTGCCTCTAAAAATAACCCTGCATGCCATGTTCCCGGCGAAGGGCCAGCTGTC |
| | CCCCGCCAGCTAGACTCAGCTCTCAGGGGCCCCTCCCTGGGGACAGCCCCTCCTGGCT |
| | AGTCACACCCTGTAGGCTCCTCTATATAACCCAGGGGCACAGGGGCTGCCCTCATTCT |
| | ACCACCACCTCCACAGCACAGACAGACACTCAGGAGCCAGCCAGC (SEQ ID NO: |
| | 2402) |
| Intron | GTAAGTATCAAGGTTACAAGACAGGTTTAAGGAGACCAATAGAAACTGGGCTTGTCGA |
| | GACAGAGAAGACTCTTGCGTTTCTGATAGGCACCTATTGGTCTTACTGACATCCACTT |
| | TGCCTTTCTCTCCACAG (SEQ ID NO: 2409) |
| Codon | ATGCTGTGGTGGGAGGAAGTGGAGGACTGCTACGAGAGAGAGGACGTGCAGAAGAAGA |
| optimized | CCTTCACCAAGTGGGTGAACGCCCAGTTCAGCAAGTTCGGCAAGCAGCACATCGAGAA |
| microdystroph | CCTGTTCAGCGACCTGCAGGACGGCAGAAGACTGCTGGACCTGCTGGAGGGCCTGACC |
| in coding | GGCCAGAAGCTGCCTAAGGAGAAGGGCAGCACCAGAGTGCACGCTCTCAACAACGTGA |
| sequence | ACAAGGCCCTGAGAGTGCTGCAGAACAACAACGTGGACCTTGTGAACATCGGAAGCAC |
| | CGACATCGTGGATGGCAACCACAAGCTGACCCTGGGACTGATCTGGAACATCATCCTG |
| | CACTGGCAGGTGAAGAACGTCATGAAGAACATCATGGCCGGCCTGCAGCAGACCAACA |
| | GCGAAAAGATCCTGCTGAGCTGGGTCAGACAGAGCACCAGAAACTACCCTCAGGTGAA |
| | CGTGATCAACTTCACCACCAGCTGGAGCGACGGCCTGGCCCTGAACGCCCTGATCCAC |
| | AGCCACAGACCCGACCTGTTCGACTGGAACAGCGTGGTGTGCCAGCAGAGCGCCACCC |
| | AGAGACTGGAGCACGCCTTCAACATCGCCAGATACCAGCTGGGCATCGAGAAGCTGCT |
| | GGACCCCGAGGACGTGGATACCACCTACCCCGACAAGAAGAGCATCCTGATGTACATC |
| | ACCAGCCTGTTCCAGGTGCTGCCCCAGCAAGTGAGCATCGAGGCCATCCAGGAGGTGG |
| | AGATGCTGCCCAGACCTCCAAAGGTGACCAAGGAGGAGCACTTCCAGCTGCACCACCA |
| | GATGCACTACAGCCAGCAGATCACCGTGAGCCTGGCCCAGGGCTACGAGAGAACCAGC |
| | AGCCCCAAGCCCAGATTCAAGAGCTACGCCTACACCCAGGCCGCCTACGTGACCACCA |
| | GCGACCCCACCAGAAGCCCCTTCCCCAGCCAGCACCTGGAGGCCCCCGAGGATAAGAG |
| | CTTCGGCAGCAGCCTGATGGAGAGCGAGGTGAACTTGGACAGATACCAGACCGCCCTG |
| | GAGGAGGTGCTGAGCTGGCTGCTGAGCGCCGAGGACACCCTTCAGGCACAGGGCGAGA |
| | TCAGCAACGACGTGGAGGTGGTGAAGGACCAGTTCCACACCCACGAGGGCTACATGAT |
| | GGACCTGACCGCCCACCAGGGCAGAGTGGGTAACATCCTCCAGCTGGGAAGCAAGCTG |
| | ATCGGCACCGGCAAGCTGAGCGAGGACGAGGAGACCGAGGTGCAAGAGCAAATGAACC |
| | TGCTTAACAGCAGATGGGAGTGCCTGAGAGTGGCCAGCATGGAGAAGCAGAGCAACCT |
| | GCACAGAGTGCTGATGGACCTGCAGAACCAGAAGCTGAAGGAGCTGAACGACTGGCTG |
| | ACCAAGACCGAGGAGAGAACCAGAAAGATGGAGGAGGAGCCCCTGGGCCCGGACCTGG |
| | AGGACCTGAAGCGGCAGGTGCAGCAGCACAAGGTCTTACAGGAGGACCTGGAGCAGGA |
| | GCAAGTGAGAGTGAACAGCCTGACCCACATGGTGGTGGTGGTGGATGAGAGCAGCGGC |
| | GACCACGCCACCGCCGCCCTGGAGGAGCAGCTGAAGGTGCTGGGCGACAGATGGGCCA |
| | ACATCTGCAGATGGACCGAGGACAGATGGGTTCTGCTGCAGGACATCCTGCTGAAGTG |
| | GCAGAGACTGACCGAGGAACAGTGCCTGTTCAGCGCCTGGCTGAGTGAGAAGGAAGAC |
| | GCTGTGAACAAGATCCACACCACCGGCTTCAAGGACCAGAACGAGATGCTGAGCAGCC |
| | TGCAGAAGCTGGCCGTGCTGAAGGCAGACCTGGAGAAGAAAAAGCAGTCCATGGGAAA |
| | GCTGTACAGCCTGAAGCAAGACCTGCTGAGCACCCTGAAGAACAAGAGCGTGACCCAG |
| | AAGACCGAGGCCTGGCTGGACAACTTCGCCAGATGCTGGGACAACCTGGTTCAGAAGC |
| | TGGAGAAGAGCACCGCCCAGATCAGCCAGGCCGTGACCACCACCCAGCCCAGCCTGAC |
| | CCAGACCACCGTGATGGAGACCGTGACCACCGTGACCACCAGAGAGCAGATCCTGGTG |
| | AAGCACGCCCAGGAGGAGCTGCCCCCTCCTCCCCCGCAAAAGAAGAGAACCCTGGAGA |
| | GACTGCAGGAGCTGCAGGAGGCTACCGATGAGCTGGACCTGAAGCTGAGACAGGCCGA |
| | GGTGATCAAGGGCAGCTGGCAGCCCGTGGGTGACCTGCTTATCGACAGCCTGCAGGAC |
| | CACCTAGAGAAGGTGAAGGCCCTGAGAGGCGAGATCGCCCCTCTGAAGGAGAACGTGA |
| | GCCACGTGAACGACCTGGCCAGACAGCTGACCACCCTGGGAATCCAGCTGAGCCCCTA |
| | CAACCTGAGCACCCTGGAGGACCTGAACACGAGATGGAAGCTGCTGCAAGTGGCCGTG |
| | GAGGACAGAGTCAGACAGTTGCACGAGGCTCACAGAGATTTCGGCCCCGCTAGTCAGC |
| | ACTTCCTGAGCACCAGCGTGCAGGGCCCCTGGGAGAGAGCTATCAGCCCAAACAAGGT |
| | GCCCTACTACATCAACCACGAGACCCAGACCACCTGCTGGGACCACCCCAAGATGACC |
| | GAGCTGTACCAGAGCCTGGCAGACCTCAACAACGTGAGATTCAGCGCCTACAGAACCG |
| | CCATGAAGCTGAGAAGACTGCAGAAGGCCCTGTGCCTGGACCTGCTGAGCCTGAGCGC |
| | CGCCTGCGACGCCCTGGACCAGCACAACCTGAAGCAGAACGACCAGCCCATGGACATC |
| | CTTCAGATCATCAACTGCCTGACCACCATCTACGACAGACTGGAGCAGGAACATAACA |
| | ACCTGGTGAACGTGCCCCTGTGCGTGGACATGTGCCTGAACTGGCTGCTGAACGTGTA |
| | CGACACCGGCAGAACAGGCAGAATCAGAGTGCTGAGCTTCAAGACCGGCATCATCAGC |
| | CTGTGCAAGGCCCACCTGGAGGACAAGTACAGATACTTATTCAAGCAGGTGGCCAGCA |
| | GCACCGGCTTCTGCGATCAGAGAAGACTGGGCCTGCTGCTGCACGACAGCATCCAGAT |
| | CCCCAGACAGCTGGGCGAAGTGGCCAGCTTCGGCGGCAGCAACATCGAGCCCAGCGTG |
| | AGAAGCTGCTTCCAGTTCGCTAACAACAAGCCCGAGATCGAGGCCGCCCTGTTCTTGG |
| | ACTGGATGAGACTGGAGCCCCAGAGCATGGTGTGGCTGCCCGTGCTGCACAGAGTGGC |
| | CGCCGCCGAGACCGCCAAGCACCAGGCCAAGTGTAACATCTGCAAGGAGTGCCCAATC |
| | ATCGGCTTCAGATACAGAAGCCTGAAGCACTTCAACTACGACATCTGCCAGAGCTGCT |
| | TCTTCAGCGGCAGAGTGGCCAAGGGCCACAAGATGCACTACCCCATGGTGGAGTACTG |
| | CACCCCCACCACCAGCGGCGAGGACGTGAGAGACTTCGCAAAGGTCCTGAAGAACAAG |
| | TTCAGAACCAAGAGATACTTCGCTAAGCACCCCAGAATGGGCTACCTGCCCGTGCAGA |
| | CCGTGCTGGAGGGCGATAACATGGAGACCGACACCATGTGA (SEQ ID NO: |
| | 2405) |
| First DRG de- | TCATACAGCTAGATAACCAAAGA (SEQ ID NO: 2401) |
| targeting | |
| miRNA binding | |
| site | |
| Second DRG | TCATACAGCTAGATAACCAAAGA (SEQ ID NO: 2401) |
| de-targeting | |
| miRNA binding | |
| site | |
| Short polyA | AGGAATAAAATATCTTTATTTTCATTACATCTGTGTGTTGGTTTTTTGTGTG (SEQ |
| | ID NO: 2410) |
| AAV2 ITR | AGGAACCCCTAGTGATGGAGTTGGCCACTCCCTCTCTGCGCGCTCGCTCGCTCACTGA |
| | GGCCGGGCGACCAAAGGTCGCCCGACGCCCGGGCTTTGCCCGGGCGGCCTCAGTGAGC |
| | GAGCGAGCGCGC (SEQ ID NO: 2411) |

Nucleic acid 8
(SEQ ID NO: 2419)
GCGCGCTCGCTCGCTCACTGAGGCCGCCCGGGCAAAGCCCGGGCGTCGGGCGACCTTTGGTCGCCCGGCCTCAGT
GAGCGAGCGAGCGCGCAGAGAGGGAGTGGCCAACTCCATCACTAGGGGTTCCTCGTCTGTCTAATTCCAGCCAAG
GGCATGGGGGAAAGGACAGAGCCCAGGGACCTGTGGCCTATTCTCTGAGAGGACGCTGGGCTAATAATAGGAGGG
GAGATTAGGGAGGGATTTGACTGCATTGTTATCTCACAGGAATGGCGTTTGAGAGCCTTGCTTCCAAGCTCTTCC
AAGAGTCATGCCACCCCCCTCCAATCTCTGTGGAAGTGCCCACTGCCTTTCCCGCTTCGTTCTCTTCTCTCTAAA
TCTGAGCCCACCCCACTCAGGGGTACAGGATCTGGTTCATTTATCTCCCAGAATGATGCCTTGGGTTGCGTCCCC
TCTAAACTCTGGCACATTCCAGCCCCTCTTTGGGAGAAAGAACATCTCTTCTTGCCCAGGCCCTAGTGAGACATG
CATCGCAAGACATGCTCCCCCCTTCCTCCCCGCTGGGCTCCAGCTGCTGCCAGCCCTCCAAGAAAGGAGAGGCCC
TGAGTTGGGCTATTTTGGTATCTGGGGTGGGCACCCGCAGGGCTAAGGTTACCTTGGTATGTTAAGGGCTCCCTG
GGGCAGGACTATATAACCCCAGAGGGACTGCCCCATGCTGACTCCTTGCTTCTTTCCTGCTCGAGCCGCTGCCTT
GCCCCCCGGAGACTGAAGACACAGCCCAGGTACCTGGGCAGGTAAGTATCAAGGTTACAAGACAGGTTTAAGGAG
ACCAATAGAAACTGGGCTTGTCGAGACAGAGAAGACTCTTGCGTTTCTGATAGGCACCTATTGGTCTTACTGACA
TCCACTTTGCCTTTCTCTCCACAGGTGTCCAGACTAGTGCCACCATGCTGTGGTGGGAGGAAGTGGAGGACTGCT
ACGAGAGAGAGGACGTGCAGAAGAAGACCTTCACCAAGTGGGTGAACGCCCAGTTCAGCAAGTTCGGCAAGCAGC
ACATCGAGAACCTGTTCAGCGACCTGCAGGACGGCAGAAGACTGCTGGACCTGCTGGAGGGCCTGACCGGCCAGA
AGCTGCCTAAGGAGAAGGGCAGCACCAGAGTGCACGCTCTCAACAACGTGAACAAGGCCCTGAGAGTGCTGCAGA
ACAACAACGTGGACCTTGTGAACATCGGAAGCACCGACATCGTGGATGGCAACCACAAGCTGACCCTGGGACTGA
TCTGGAACATCATCCTGCACTGGCAGGTGAAGAACGTCATGAAGAACATCATGGCCGGCCTGCAGCAGACCAACA
GCGAAAAGATCCTGCTGAGCTGGGTCAGACAGAGCACCAGAAACTACCCTCAGGTGAACGTGATCAACTTCACCA
CCAGCTGGAGCGACGGCCTGGCCCTGAACGCCCTGATCCACAGCCACAGACCCGACCTGTTCGACTGGAACAGCG
TGGTGTGCCAGCAGAGCGCCACCCAGAGACTGGAGCACGCCTTCAACATCGCCAGATACCAGCTGGGCATCGAGA
AGCTGCTGGACCCCGAGGACGTGGATACCACCTACCCCGACAAGAAGAGCATCCTGATGTACATCACCAGCCTGT
TCCAGGTGCTGCCCCAGCAAGTGAGCATCGAGGCCATCCAGGAGGTGGAGATGCTGCCCAGACCTCCAAAGGTGA
CCAAGGAGGAGCACTTCCAGCTGCACCACCAGATGCACTACAGCCAGCAGATCACCGTGAGCCTGGCCCAGGGCT
ACGAGAGAACCAGCAGCCCCAAGCCCAGATTCAAGAGCTACGCCTACACCCAGGCCGCCTACGTGACCACCAGCG
ACCCCACCAGAAGCCCCTTCCCCAGCCAGCACCTGGAGGCCCCCGAGGATAAGAGCTTCGGCAGCAGCCTGATGG
AGAGCGAGGTGAACTTGGACAGATACCAGACCGCCCTGGAGGAGGTGCTGAGCTGGCTGCTGAGCGCCGAGGACA
CCCTTCAGGCACAGGGCGAGATCAGCAACGACGTGGAGGTGGTGAAGGACCAGTTCCACACCCACGAGGGCTACA
TGATGGACCTGACCGCCCACCAGGGCAGAGTGGGTAACATCCTCCAGCTGGGAAGCAAGCTGATCGGCACCGGCA
AGCTGAGCGAGGACGAGGAGACCGAGGTGCAAGAGCAAATGAACCTGCTTAACAGCAGATGGGAGTGCCTGAGAG
TGGCCAGCATGGAGAAGCAGAGCAACCTGCACAGAGTGCTGATGGACCTGCAGAACCAGAAGCTGAAGGAGCTGA
ACGACTGGCTGACCAAGACCGAGGAGAGAACCAGAAAGATGGAGGAGGAGCCCCTGGGCCCGGACCTGGAGGACC
TGAAGCGGCAGGTGCAGCAGCACAAGGTCTTACAGGAGGACCTGGAGCAGGAGCAAGTGAGAGTGAACAGCCTGA
CCCACATGGTGGTGGTGGTGGATGAGAGCAGCGGCGACCACGCCACCGCCGCCCTGGAGGAGCAGCTGAAGGTGC
TGGGCGACAGATGGGCCAACATCTGCAGATGGACCGAGGACAGATGGGTTCTGCTGCAGGACATCCTGCTGAAGT
GGCAGAGACTGACCGAGGAACAGTGCCTGTTCAGCGCCTGGCTGAGTGAGAAGGAAGACGCTGTGAACAAGATCC
ACACCACCGGCTTCAAGGACCAGAACGAGATGCTGAGCAGCCTGCAGAAGCTGGCCGTGCTGAAGGCAGACCTGG
AGAAGAAAAAGCAGTCCATGGGAAAGCTGTACAGCCTGAAGCAAGACCTGCTGAGCACCCTGAAGAACAAGAGCG
TGACCCAGAAGACCGAGGCCTGGCTGGACAACTTCGCCAGATGCTGGGACAACCTGGTTCAGAAGCTGGAGAAGA
GCACCGCCCAGATCAGCCAGGCCGTGACCACCACCCAGCCCAGCCTGACCCAGACCACCGTGATGGAGACCGTGA
CCACCGTGACCACCAGAGAGCAGATCCTGGTGAAGCACGCCCAGGAGGAGCTGCCCCCTCCTCCCCCGCAAAAGA
AGAGAACCCTGGAGAGACTGCAGGAGCTGCAGGAGGCTACCGATGAGCTGGACCTGAAGCTGAGACAGGCCGAGG
TGATCAAGGGCAGCTGGCAGCCCGTGGGTGACCTGCTTATCGACAGCCTGCAGGACCACCTAGAGAAGGTGAAGG
CCCTGAGAGGCGAGATCGCCCCTCTGAAGGAGAACGTGAGCCACGTGAACGACCTGGCCAGACAGCTGACCACCC
TGGGAATCCAGCTGAGCCCCTACAACCTGAGCACCCTGGAGGACCTGAACACGAGATGGAAGCTGCTGCAAGTGG
CCGTGGAGGACAGAGTCAGACAGTTGCACGAGGCTCACAGAGATTTCGGCCCCGCTAGTCAGCACTTCCTGAGCA
CCAGCGTGCAGGGCCCCTGGGAGAGAGCTATCAGCCCAAACAAGGTGCCCTACTACATCAACCACGAGACCCAGA
CCACCTGCTGGGACCACCCCAAGATGACCGAGCTGTACCAGAGCCTGGCAGACCTCAACAACGTGAGATTCAGCG
CCTACAGAACCGCCATGAAGCTGAGAAGACTGCAGAAGGCCCTGTGCCTGGACCTGCTGAGCCTGAGCGCCGCCT
GCGACGCCCTGGACCAGCACAACCTGAAGCAGAACGACCAGCCCATGGACATCCTTCAGATCATCAACTGCCTGA
CCACCATCTACGACAGACTGGAGCAGGAACATAACAACCTGGTGAACGTGCCCCTGTGCGTGGACATGTGCCTGA
ACTGGCTGCTGAACGTGTACGACACCGGCAGAACAGGCAGAATCAGAGTGCTGAGCTTCAAGACCGGCATCATCA
GCCTGTGCAAGGCCCACCTGGAGGACAAGTACAGATACTTATTCAAGCAGGTGGCCAGCAGCACCGGCTTCTGCG
ATCAGAGAAGACTGGGCCTGCTGCTGCACGACAGCATCCAGATCCCCAGACAGCTGGGCGAAGTGGCCAGCTTCG
GCGGCAGCAACATCGAGCCCAGCGTGAGAAGCTGCTTCCAGTTCGCTAACAACAAGCCCGAGATCGAGGCCGCCC
TGTTCTTGGACTGGATGAGACTGGAGCCCCAGAGCATGGTGTGGCTGCCCGTGCTGCACAGAGTGGCCGCCGCCG
AGACCGCCAAGCACCAGGCCAAGTGTAACATCTGCAAGGAGTGCCCAATCATCGGCTTCAGATACAGAAGCCTGA
AGCACTTCAACTACGACATCTGCCAGAGCTGCTTCTTCAGCGGCAGAGTGGCCAAGGGCCACAAGATGCACTACC
CCATGGTGGAGTACTGCACCCCCACCACCAGCGGCGAGGACGTGAGAGACTTCGCAAAGGTCCTGAAGAACAAGT
TCAGAACCAAGAGATACTTCGCTAAGCACCCCAGAATGGGCTACCTGCCCGTGCAGACCGTGCTGGAGGGCGATA
ACATGGAGACCGACACCATGTGATAGATTCTCATACAGCTAGATAACCAAAGAAGATCAGTCATACAGCTAGATA
ACCAAAGAAGACGCAGGAATAAAATATCTTTATTTTCATTACATCTGTGTGTTGGTTTTTTGTGTGAGGAACCCC
TAGTGATGGAGTTGGCCACTCCCTCTCTGCGCGCTCGCTCGCTCACTGAGGCCGGGCGACCAAAGGTCGCCCGAC
GCCCGGGCTTTGCCCGGGCGGCCTCAGTGAGCGAGCGAGCGCGC

| Nucleic acid | |
|---|---|
| cargo 8 | |
| annotated | Sequence |
| AAV2 ITR | GCGCGCTCGCTCGCTCACTGAGGCCGCCCGGGCAAAGCCCGGGCGTCGGGCGACCTTT |
| | GGTCGCCCGGCCTCAGTGAGCGAGCGAGCGCGCAGAGAGGGAGTGGCCAACTCCATCA |
| | CTAGGGGTTCCT (SEQ ID NO: 2408) |
| Novel | CGTCTGTCTAATTCCAGCCAAGGGCATGGGGGAAAGGACAGAGCCCAGGGACCTGTGG |
| promoter | CCTATTCTCTGAGAGGACGCTGGGCTAATAATAGGAGGGGAGATTAGGGAGGGATTTG |
| | ACTGCATTGTTATCTCACAGGAATGGCGTTTGAGAGCCTTGCTTCCAAGCTCTTCCAA |
| | GAGTCATGCCACCCCCCTCCAATCTCTGTGGAAGTGCCCACTGCCTTTCCCGCTTCGT |
| | TCTCTTCTCTCTAAATCTGAGCCCACCCCACTCAGGGGTACAGGATCTGGTTCATTTA |
| | TCTCCCAGAATGATGCCTTGGGTTGCGTCCCCTCTAAACTCTGGCACATTCCAGCCCC |
| | TCTTTGGGAGAAAGAACATCTCTTCTTGCCCAGGCCCTAGTGAGACATGCATCGCAAG |
| | ACATGCTCCCCCCTTCCTCCCCGCTGGGCTCCAGCTGCTGCCAGCCCTCCAAGAAAGG |
| | AGAGGCCCTGAGTTGGGCTATTTTGGTATCTGGGGTGGGCACCCGCAGGGCTAAGGTT |
| | ACCTTGGTATGTTAAGGGCTCCCTGGGGCAGGACTATATAACCCCAGAGGGACTGCCC |
| | CATGCTGACTCCTTGCTTCTTTCCTGCTCGAGCCGCTGCCTTGCCCCCCGGAGACTGA |
| | AGACA (SEQ ID NO: 2403) |
| Intron | GTAAGTATCAAGGTTACAAGACAGGTTTAAGGAGACCAATAGAAACTGGGCTTGTCGA |
| | GACAGAGAAGACTCTTGCGTTTCTGATAGGCACCTATTGGTCTTACTGACATCCACTT |
| | TGCCTTTCTCTCCACAG (SEQ ID NO: 2409) |
| Codon | ATGCTGTGGTGGGAGGAAGTGGAGGACTGCTACGAGAGAGAGGACGTGCAGAAGAAGA |
| optimized | CCTTCACCAAGTGGGTGAACGCCCAGTTCAGCAAGTTCGGCAAGCAGCACATCGAGAA |
| microdystroph | CCTGTTCAGCGACCTGCAGGACGGCAGAAGACTGCTGGACCTGCTGGAGGGCCTGACC |
| in coding | GGCCAGAAGCTGCCTAAGGAGAAGGGCAGCACCAGAGTGCACGCTCTCAACAACGTGA |
| sequence | ACAAGGCCCTGAGAGTGCTGCAGAACAACAACGTGGACCTTGTGAACATCGGAAGCAC |
| | CGACATCGTGGATGGCAACCACAAGCTGACCCTGGGACTGATCTGGAACATCATCCTG |
| | CACTGGCAGGTGAAGAACGTCATGAAGAACATCATGGCCGGCCTGCAGCAGACCAACA |
| | GCGAAAAGATCCTGCTGAGCTGGGTCAGACAGAGCACCAGAAACTACCCTCAGGTGAA |
| | CGTGATCAACTTCACCACCAGCTGGAGCGACGGCCTGGCCCTGAACGCCCTGATCCAC |
| | AGCCACAGACCCGACCTGTTCGACTGGAACAGCGTGGTGTGCCAGCAGAGCGCCACCC |
| | AGAGACTGGAGCACGCCTTCAACATCGCCAGATACCAGCTGGGCATCGAGAAGCTGCT |
| | GGACCCCGAGGACGTGGATACCACCTACCCCGACAAGAAGAGCATCCTGATGTACATC |
| | ACCAGCCTGTTCCAGGTGCTGCCCCAGCAAGTGAGCATCGAGGCCATCCAGGAGGTGG |
| | AGATGCTGCCCAGACCTCCAAAGGTGACCAAGGAGGAGCACTTCCAGCTGCACCACCA |
| | GATGCACTACAGCCAGCAGATCACCGTGAGCCTGGCCCAGGGCTACGAGAGAACCAGC |
| | AGCCCCAAGCCCAGATTCAAGAGCTACGCCTACACCCAGGCCGCCTACGTGACCACCA |
| | GCGACCCCACCAGAAGCCCCTTCCCCAGCCAGCACCTGGAGGCCCCCGAGGATAAGAG |
| | CTTCGGCAGCAGCCTGATGGAGAGCGAGGTGAACTTGGACAGATACCAGACCGCCCTG |
| | GAGGAGGTGCTGAGCTGGCTGCTGAGCGCCGAGGACACCCTTCAGGCACAGGGCGAGA |
| | TCAGCAACGACGTGGAGGTGGTGAAGGACCAGTTCCACACCCACGAGGGCTACATGAT |
| | GGACCTGACCGCCCACCAGGGCAGAGTGGGTAACATCCTCCAGCTGGGAAGCAAGCTG |
| | ATCGGCACCGGCAAGCTGAGCGAGGACGAGGAGACCGAGGTGCAAGAGCAAATGAACC |
| | TGCTTAACAGCAGATGGGAGTGCCTGAGAGTGGCCAGCATGGAGAAGCAGAGCAACCT |
| | GCACAGAGTGCTGATGGACCTGCAGAACCAGAAGCTGAAGGAGCTGAACGACTGGCTG |
| | ACCAAGACCGAGGAGAGAACCAGAAAGATGGAGGAGGAGCCCCTGGGCCCGGACCTGG |
| | AGGACCTGAAGCGGCAGGTGCAGCAGCACAAGGTCTTACAGGAGGACCTGGAGCAGGA |
| | GCAAGTGAGAGTGAACAGCCTGACCCACATGGTGGTGGTGGTGGATGAGAGCAGCGGC |
| | GACCACGCCACCGCCGCCCTGGAGGAGCAGCTGAAGGTGCTGGGCGACAGATGGGCCA |
| | ACATCTGCAGATGGACCGAGGACAGATGGGTTCTGCTGCAGGACATCCTGCTGAAGTG |
| | GCAGAGACTGACCGAGGAACAGTGCCTGTTCAGCGCCTGGCTGAGTGAGAAGGAAGAC |
| | GCTGTGAACAAGATCCACACCACCGGCTTCAAGGACCAGAACGAGATGCTGAGCAGCC |
| | TGCAGAAGCTGGCCGTGCTGAAGGCAGACCTGGAGAAGAAAAAGCAGTCCATGGGAAA |
| | GCTGTACAGCCTGAAGCAAGACCTGCTGAGCACCCTGAAGAACAAGAGCGTGACCCAG |
| | AAGACCGAGGCCTGGCTGGACAACTTCGCCAGATGCTGGGACAACCTGGTTCAGAAGC |
| | TGGAGAAGAGCACCGCCCAGATCAGCCAGGCCGTGACCACCACCCAGCCCAGCCTGAC |
| | CCAGACCACCGTGATGGAGACCGTGACCACCGTGACCACCAGAGAGCAGATCCTGGTG |
| | AAGCACGCCCAGGAGGAGCTGCCCCCTCCTCCCCCGCAAAAGAAGAGAACCCTGGAGA |
| | GACTGCAGGAGCTGCAGGAGGCTACCGATGAGCTGGACCTGAAGCTGAGACAGGCCGA |
| | GGTGATCAAGGGCAGCTGGCAGCCCGTGGGTGACCTGCTTATCGACAGCCTGCAGGAC |
| | CACCTAGAGAAGGTGAAGGCCCTGAGAGGCGAGATCGCCCCTCTGAAGGAGAACGTGA |
| | GCCACGTGAACGACCTGGCCAGACAGCTGACCACCCTGGGAATCCAGCTGAGCCCCTA |
| | CAACCTGAGCACCCTGGAGGACCTGAACACGAGATGGAAGCTGCTGCAAGTGGCCGTG |
| | GAGGACAGAGTCAGACAGTTGCACGAGGCTCACAGAGATTTCGGCCCCGCTAGTCAGC |
| | ACTTCCTGAGCACCAGCGTGCAGGGCCCCTGGGAGAGAGCTATCAGCCCAAACAAGGT |
| | GCCCTACTACATCAACCACGAGACCCAGACCACCTGCTGGGACCACCCCAAGATGACC |
| | GAGCTGTACCAGAGCCTGGCAGACCTCAACAACGTGAGATTCAGCGCCTACAGAACCG |
| | CCATGAAGCTGAGAAGACTGCAGAAGGCCCTGTGCCTGGACCTGCTGAGCCTGAGCGC |
| | CGCCTGCGACGCCCTGGACCAGCACAACCTGAAGCAGAACGACCAGCCCATGGACATC |
| | CTTCAGATCATCAACTGCCTGACCACCATCTACGACAGACTGGAGCAGGAACATAACA |
| | ACCTGGTGAACGTGCCCCTGTGCGTGGACATGTGCCTGAACTGGCTGCTGAACGTGTA |
| | CGACACCGGCAGAACAGGCAGAATCAGAGTGCTGAGCTTCAAGACCGGCATCATCAGC |
| | CTGTGCAAGGCCCACCTGGAGGACAAGTACAGATACTTATTCAAGCAGGTGGCCAGCA |
| | GCACCGGCTTCTGCGATCAGAGAAGACTGGGCCTGCTGCTGCACGACAGCATCCAGAT |
| | CCCCAGACAGCTGGGCGAAGTGGCCAGCTTCGGCGGCAGCAACATCGAGCCCAGCGTG |
| | AGAAGCTGCTTCCAGTTCGCTAACAACAAGCCCGAGATCGAGGCCGCCCTGTTCTTGG |
| | ACTGGATGAGACTGGAGCCCCAGAGCATGGTGTGGCTGCCCGTGCTGCACAGAGTGGC |
| | CGCCGCCGAGACCGCCAAGCACCAGGCCAAGTGTAACATCTGCAAGGAGTGCCCAATC |
| | ATCGGCTTCAGATACAGAAGCCTGAAGCACTTCAACTACGACATCTGCCAGAGCTGCT |
| | TCTTCAGCGGCAGAGTGGCCAAGGGCCACAAGATGCACTACCCCATGGTGGAGTACTG |
| | CACCCCCACCACCAGCGGCGAGGACGTGAGAGACTTCGCAAAGGTCCTGAAGAACAAG |
| | TTCAGAACCAAGAGATACTTCGCTAAGCACCCCAGAATGGGCTACCTGCCCGTGCAGA |
| | CCGTGCTGGAGGGCGATAACATGGAGACCGACACCATGTGA (SEQ ID NO: |
| | 2405) |
| First DRG de- | TCATACAGCTAGATAACCAAAGA (SEQ ID NO: 2401) |
| targeting | |
| miRNA binding | |
| site | |
| Second DRG | TCATACAGCTAGATAACCAAAGA (SEQ ID NO: 2401) |
| de-targeting | |
| miRNA binding | |
| site | |
| Short polyA | AGGAATAAAATATCTTTATTTTCATTACATCTGTGTGTTGGTTTTTTGTGTG (SEQ |
| | ID NO: 2410) |
| AAV2 ITR | AGGAACCCCTAGTGATGGAGTTGGCCACTCCCTCTCTGCGCGCTCGCTCGCTCACTGA |
| | GGCCGGGCGACCAAAGGTCGCCCGACGCCCGGGCTTTGCCCGGGCGGCCTCAGTGAGC |
| | GAGCGAGCGCGC (SEQ ID NO: 2411) |

Nucleic acid 9
(SEQ ID NO: 2420)
GCGCGCTCGCTCGCTCACTGAGGCCGCCCGGGCAAAGCCCGGGCGTCGGGCGACCTTTGGTCGCCCGGCCTCAGT
GAGCGAGCGAGCGCGCAGAGAGGGAGTGGCCAACTCCATCACTAGGGGTTCCTCGTCTGTCTAATTCCAGCCAAG
GGCATGGGGGAAAGGACAGAGCCCAGGGACCTGTGGCCTATTCTCTGAGAGGACGCTGGGCTAATAATAGGAGGG
GAGATTAGGGAGGGATTTGACTGCATTGTTATCTCACAGGAATGGCGTTTGAGAGCCTTGCTTCCAAGCTCTTCC
AAGAGTCATGCCACCCCCCTCCAATCTCTGTGGAAGTGCCCACTGCCTTTCCCGCTTCGTTCTCTTCTCTCGGTC
CCATCCCTGACCCACTAGCCTGGTGCCGGGGGGAGACCAATTTCTGGAGGAAGCTCTGGGTACCCAGTCTTGCCC
TAAGCCTGCCTCTGAACAGGCTGTTCTTGTTTATGACCCCCGTCCCAGCAGAATAGTGATTGCTCATCCCTGCAT
GTGATTTGAGAGGGCCAGTCTTTCAGGCCTGGAGGAAACTCAAGCCCCACCAGCCGCTTGGCATCGGAATGCTCA
GCTGGTCCCCTCCTGGGGCTCATGTGACCAAGATCTAGCTATAAATATCAGAGGGGCCTCAGACCAAGACAGAAT
TCGGGCACCAGGAGAAGGAAGCCAACAGGATCCGACCCGGTGTTTTGTGACAAAGGCAAGACCCCCAGGTCTACT
TAGAGCAACGTTAGTAGAGGACAGCCCAGGTACCTGGGCAGGTAAGTATCAAGGTTACAAGACAGGTTTAAGGAG
ACCAATAGAAACTGGGCTTGTCGAGACAGAGAAGACTCTTGCGTTTCTGATAGGCACCTATTGGTCTTACTGACA
TCCACTTTGCCTTTCTCTCCACAGGTGTCCAGACTAGTGCCACCATGCTGTGGTGGGAGGAAGTGGAGGACTGCT
ACGAGAGAGAGGACGTGCAGAAGAAGACCTTCACCAAGTGGGTGAACGCCCAGTTCAGCAAGTTCGGCAAGCAGC
ACATCGAGAACCTGTTCAGCGACCTGCAGGACGGCAGAAGACTGCTGGACCTGCTGGAGGGCCTGACCGGCCAGA
AGCTGCCTAAGGAGAAGGGCAGCACCAGAGTGCACGCTCTCAACAACGTGAACAAGGCCCTGAGAGTGCTGCAGA
ACAACAACGTGGACCTTGTGAACATCGGAAGCACCGACATCGTGGATGGCAACCACAAGCTGACCCTGGGACTGA
TCTGGAACATCATCCTGCACTGGCAGGTGAAGAACGTCATGAAGAACATCATGGCCGGCCTGCAGCAGACCAACA
GCGAAAAGATCCTGCTGAGCTGGGTCAGACAGAGCACCAGAAACTACCCTCAGGTGAACGTGATCAACTTCACCA
CCAGCTGGAGCGACGGCCTGGCCCTGAACGCCCTGATCCACAGCCACAGACCCGACCTGTTCGACTGGAACAGCG
TGGTGTGCCAGCAGAGCGCCACCCAGAGACTGGAGCACGCCTTCAACATCGCCAGATACCAGCTGGGCATCGAGA
AGCTGCTGGACCCCGAGGACGTGGATACCACCTACCCCGACAAGAAGAGCATCCTGATGTACATCACCAGCCTGT
TCCAGGTGCTGCCCCAGCAAGTGAGCATCGAGGCCATCCAGGAGGTGGAGATGCTGCCCAGACCTCCAAAGGTGA
CCAAGGAGGAGCACTTCCAGCTGCACCACCAGATGCACTACAGCCAGCAGATCACCGTGAGCCTGGCCCAGGGCT
ACGAGAGAACCAGCAGCCCCAAGCCCAGATTCAAGAGCTACGCCTACACCCAGGCCGCCTACGTGACCACCAGCG
ACCCCACCAGAAGCCCCTTCCCCAGCCAGCACCTGGAGGCCCCCGAGGATAAGAGCTTCGGCAGCAGCCTGATGG
AGAGCGAGGTGAACTTGGACAGATACCAGACCGCCCTGGAGGAGGTGCTGAGCTGGCTGCTGAGCGCCGAGGACA
CCCTTCAGGCACAGGGCGAGATCAGCAACGACGTGGAGGTGGTGAAGGACCAGTTCCACACCCACGAGGGCTACA
TGATGGACCTGACCGCCCACCAGGGCAGAGTGGGTAACATCCTCCAGCTGGGAAGCAAGCTGATCGGCACCGGCA
AGCTGAGCGAGGACGAGGAGACCGAGGTGCAAGAGCAAATGAACCTGCTTAACAGCAGATGGGAGTGCCTGAGAG
TGGCCAGCATGGAGAAGCAGAGCAACCTGCACAGAGTGCTGATGGACCTGCAGAACCAGAAGCTGAAGGAGCTGA
ACGACTGGCTGACCAAGACCGAGGAGAGAACCAGAAAGATGGAGGAGGAGCCCCTGGGCCCGGACCTGGAGGACC
TGAAGCGGCAGGTGCAGCAGCACAAGGTCTTACAGGAGGACCTGGAGCAGGAGCAAGTGAGAGTGAACAGCCTGA
CCCACATGGTGGTGGTGGTGGATGAGAGCAGCGGCGACCACGCCACCGCCGCCCTGGAGGAGCAGCTGAAGGTGC
TGGGCGACAGATGGGCCAACATCTGCAGATGGACCGAGGACAGATGGGTTCTGCTGCAGGACATCCTGCTGAAGT
GGCAGAGACTGACCGAGGAACAGTGCCTGTTCAGCGCCTGGCTGAGTGAGAAGGAAGACGCTGTGAACAAGATCC
ACACCACCGGCTTCAAGGACCAGAACGAGATGCTGAGCAGCCTGCAGAAGCTGGCCGTGCTGAAGGCAGACCTGG
AGAAGAAAAAGCAGTCCATGGGAAAGCTGTACAGCCTGAAGCAAGACCTGCTGAGCACCCTGAAGAACAAGAGCG
TGACCCAGAAGACCGAGGCCTGGCTGGACAACTTCGCCAGATGCTGGGACAACCTGGTTCAGAAGCTGGAGAAGA
GCACCGCCCAGATCAGCCAGGCCGTGACCACCACCCAGCCCAGCCTGACCCAGACCACCGTGATGGAGACCGTGA
CCACCGTGACCACCAGAGAGCAGATCCTGGTGAAGCACGCCCAGGAGGAGCTGCCCCCTCCTCCCCCGCAAAAGA
AGAGAACCCTGGAGAGACTGCAGGAGCTGCAGGAGGCTACCGATGAGCTGGACCTGAAGCTGAGACAGGCCGAGG
TGATCAAGGGCAGCTGGCAGCCCGTGGGTGACCTGCTTATCGACAGCCTGCAGGACCACCTAGAGAAGGTGAAGG
CCCTGAGAGGCGAGATCGCCCCTCTGAAGGAGAACGTGAGCCACGTGAACGACCTGGCCAGACAGCTGACCACCC
TGGGAATCCAGCTGAGCCCCTACAACCTGAGCACCCTGGAGGACCTGAACACGAGATGGAAGCTGCTGCAAGTGG
CCGTGGAGGACAGAGTCAGACAGTTGCACGAGGCTCACAGAGATTTCGGCCCCGCTAGTCAGCACTTCCTGAGCA
CCAGCGTGCAGGGCCCCTGGGAGAGAGCTATCAGCCCAAACAAGGTGCCCTACTACATCAACCACGAGACCCAGA
CCACCTGCTGGGACCACCCCAAGATGACCGAGCTGTACCAGAGCCTGGCAGACCTCAACAACGTGAGATTCAGCG
CCTACAGAACCGCCATGAAGCTGAGAAGACTGCAGAAGGCCCTGTGCCTGGACCTGCTGAGCCTGAGCGCCGCCT
GCGACGCCCTGGACCAGCACAACCTGAAGCAGAACGACCAGCCCATGGACATCCTTCAGATCATCAACTGCCTGA
CCACCATCTACGACAGACTGGAGCAGGAACATAACAACCTGGTGAACGTGCCCCTGTGCGTGGACATGTGCCTGA
ACTGGCTGCTGAACGTGTACGACACCGGCAGAACAGGCAGAATCAGAGTGCTGAGCTTCAAGACCGGCATCATCA
GCCTGTGCAAGGCCCACCTGGAGGACAAGTACAGATACTTATTCAAGCAGGTGGCCAGCAGCACCGGCTTCTGCG
ATCAGAGAAGACTGGGCCTGCTGCTGCACGACAGCATCCAGATCCCCAGACAGCTGGGCGAAGTGGCCAGCTTCG
GCGGCAGCAACATCGAGCCCAGCGTGAGAAGCTGCTTCCAGTTCGCTAACAACAAGCCCGAGATCGAGGCCGCCC
TGTTCTTGGACTGGATGAGACTGGAGCCCCAGAGCATGGTGTGGCTGCCCGTGCTGCACAGAGTGGCCGCCGCCG
AGACCGCCAAGCACCAGGCCAAGTGTAACATCTGCAAGGAGTGCCCAATCATCGGCTTCAGATACAGAAGCCTGA
AGCACTTCAACTACGACATCTGCCAGAGCTGCTTCTTCAGCGGCAGAGTGGCCAAGGGCCACAAGATGCACTACC
CCATGGTGGAGTACTGCACCCCCACCACCAGCGGCGAGGACGTGAGAGACTTCGCAAAGGTCCTGAAGAACAAGT
TCAGAACCAAGAGATACTTCGCTAAGCACCCCAGAATGGGCTACCTGCCCGTGCAGACCGTGCTGGAGGGCGATA
ACATGGAGACCGACACCATGTGATAGATTCTCATACAGCTAGATAACCAAAGAAGATCAGTCATACAGCTAGATA
ACCAAAGAAGACGCAGGAATAAAATATCTTTATTTTCATTACATCTGTGTGTTGGTTTTTTGTGTGAGGAACCCC
TAGTGATGGAGTTGGCCACTCCCTCTCTGCGCGCTCGCTCGCTCACTGAGGCCGGGCGACCAAAGGTCGCCCGAC
GCCCGGGCTTTGCCCGGGCGGCCTCAGTGAGCGAGCGAGCGCGC

| Nucleic acid | |
|---|---|
| cargo 9 | |
| annotated | Sequence |
| AAV2 ITR | GCGCGCTCGCTCGCTCACTGAGGCCGCCCGGGCAAAGCCCGGGCGTCGGGCGACCTTT |
| | GGTCGCCCGGCCTCAGTGAGCGAGCGAGCGCGCAGAGAGGGAGTGGCCAACTCCATCA |
| | CTAGGGGTTCCT (SEQ ID NO: 2408) |
| Novel | CGTCTGTCTAATTCCAGCCAAGGGCATGGGGGAAAGGACAGAGCCCAGGGACCTGTGG |
| promoter | CCTATTCTCTGAGAGGACGCTGGGCTAATAATAGGAGGGGAGATTAGGGAGGGATTTG |
| | ACTGCATTGTTATCTCACAGGAATGGCGTTTGAGAGCCTTGCTTCCAAGCTCTTCCAA |
| | GAGTCATGCCACCCCCCTCCAATCTCTGTGGAAGTGCCCACTGCCTTTCCCGCTTCGT |
| | TCTCTTCTCTCGGTCCCATCCCTGACCCACTAGCCTGGTGCCGGGGGGAGACCAATTT |
| | CTGGAGGAAGCTCTGGGTACCCAGTCTTGCCCTAAGCCTGCCTCTGAACAGGCTGTTC |
| | TTGTTTATGACCCCCGTCCCAGCAGAATAGTGATTGCTCATCCCTGCATGTGATTTGA |
| | GAGGGCCAGTCTTTCAGGCCTGGAGGAAACTCAAGCCCCACCAGCCGCTTGGCATCGG |
| | AATGCTCAGCTGGTCCCCTCCTGGGGCTCATGTGACCAAGATCTAGCTATAAATATCA |
| | GAGGGGCCTCAGACCAAGACAGAATTCGGGCACCAGGAGAAGGAAGCCAACAGGATCC |
| | GACCCGGTGTTTTGTGACAAAGGCAAGACCCCCAGGTCTACTTAGAGCAACGTTAGTA |
| | GAGGA (SEQ ID NO: 2404) |
| Intron | GTAAGTATCAAGGTTACAAGACAGGTTTAAGGAGACCAATAGAAACTGGGCTTGTCGA |
| | GACAGAGAAGACTCTTGCGTTTCTGATAGGCACCTATTGGTCTTACTGACATCCACTT |
| | TGCCTTTCTCTCCACAG (SEQ ID NO: 2409) |
| Codon | ATGCTGTGGTGGGAGGAAGTGGAGGACTGCTACGAGAGAGAGGACGTGCAGAAGAAGA |
| optimized | CCTTCACCAAGTGGGTGAACGCCCAGTTCAGCAAGTTCGGCAAGCAGCACATCGAGAA |
| microdystroph | CCTGTTCAGCGACCTGCAGGACGGCAGAAGACTGCTGGACCTGCTGGAGGGCCTGACC |
| in coding | GGCCAGAAGCTGCCTAAGGAGAAGGGCAGCACCAGAGTGCACGCTCTCAACAACGTGA |
| sequence | ACAAGGCCCTGAGAGTGCTGCAGAACAACAACGTGGACCTTGTGAACATCGGAAGCAC |
| | CGACATCGTGGATGGCAACCACAAGCTGACCCTGGGACTGATCTGGAACATCATCCTG |
| | CACTGGCAGGTGAAGAACGTCATGAAGAACATCATGGCCGGCCTGCAGCAGACCAACA |
| | GCGAAAAGATCCTGCTGAGCTGGGTCAGACAGAGCACCAGAAACTACCCTCAGGTGAA |
| | CGTGATCAACTTCACCACCAGCTGGAGCGACGGCCTGGCCCTGAACGCCCTGATCCAC |
| | AGCCACAGACCCGACCTGTTCGACTGGAACAGCGTGGTGTGCCAGCAGAGCGCCACCC |
| | AGAGACTGGAGCACGCCTTCAACATCGCCAGATACCAGCTGGGCATCGAGAAGCTGCT |
| | GGACCCCGAGGACGTGGATACCACCTACCCCGACAAGAAGAGCATCCTGATGTACATC |
| | ACCAGCCTGTTCCAGGTGCTGCCCCAGCAAGTGAGCATCGAGGCCATCCAGGAGGTGG |
| | AGATGCTGCCCAGACCTCCAAAGGTGACCAAGGAGGAGCACTTCCAGCTGCACCACCA |
| | GATGCACTACAGCCAGCAGATCACCGTGAGCCTGGCCCAGGGCTACGAGAGAACCAGC |
| | AGCCCCAAGCCCAGATTCAAGAGCTACGCCTACACCCAGGCCGCCTACGTGACCACCA |
| | GCGACCCCACCAGAAGCCCCTTCCCCAGCCAGCACCTGGAGGCCCCCGAGGATAAGAG |
| | CTTCGGCAGCAGCCTGATGGAGAGCGAGGTGAACTTGGACAGATACCAGACCGCCCTG |
| | GAGGAGGTGCTGAGCTGGCTGCTGAGCGCCGAGGACACCCTTCAGGCACAGGGCGAGA |
| | TCAGCAACGACGTGGAGGTGGTGAAGGACCAGTTCCACACCCACGAGGGCTACATGAT |
| | GGACCTGACCGCCCACCAGGGCAGAGTGGGTAACATCCTCCAGCTGGGAAGCAAGCTG |
| | ATCGGCACCGGCAAGCTGAGCGAGGACGAGGAGACCGAGGTGCAAGAGCAAATGAACC |
| | TGCTTAACAGCAGATGGGAGTGCCTGAGAGTGGCCAGCATGGAGAAGCAGAGCAACCT |
| | GCACAGAGTGCTGATGGACCTGCAGAACCAGAAGCTGAAGGAGCTGAACGACTGGCTG |
| | ACCAAGACCGAGGAGAGAACCAGAAAGATGGAGGAGGAGCCCCTGGGCCCGGACCTGG |
| | AGGACCTGAAGCGGCAGGTGCAGCAGCACAAGGTCTTACAGGAGGACCTGGAGCAGGA |
| | GCAAGTGAGAGTGAACAGCCTGACCCACATGGTGGTGGTGGTGGATGAGAGCAGCGGC |
| | GACCACGCCACCGCCGCCCTGGAGGAGCAGCTGAAGGTGCTGGGCGACAGATGGGCCA |
| | ACATCTGCAGATGGACCGAGGACAGATGGGTTCTGCTGCAGGACATCCTGCTGAAGTG |
| | GCAGAGACTGACCGAGGAACAGTGCCTGTTCAGCGCCTGGCTGAGTGAGAAGGAAGAC |
| | GCTGTGAACAAGATCCACACCACCGGCTTCAAGGACCAGAACGAGATGCTGAGCAGCC |
| | TGCAGAAGCTGGCCGTGCTGAAGGCAGACCTGGAGAAGAAAAAGCAGTCCATGGGAAA |
| | GCTGTACAGCCTGAAGCAAGACCTGCTGAGCACCCTGAAGAACAAGAGCGTGACCCAG |
| | AAGACCGAGGCCTGGCTGGACAACTTCGCCAGATGCTGGGACAACCTGGTTCAGAAGC |
| | TGGAGAAGAGCACCGCCCAGATCAGCCAGGCCGTGACCACCACCCAGCCCAGCCTGAC |
| | CCAGACCACCGTGATGGAGACCGTGACCACCGTGACCACCAGAGAGCAGATCCTGGTG |
| | AAGCACGCCCAGGAGGAGCTGCCCCCTCCTCCCCCGCAAAAGAAGAGAACCCTGGAGA |
| | GACTGCAGGAGCTGCAGGAGGCTACCGATGAGCTGGACCTGAAGCTGAGACAGGCCGA |
| | GGTGATCAAGGGCAGCTGGCAGCCCGTGGGTGACCTGCTTATCGACAGCCTGCAGGAC |
| | CACCTAGAGAAGGTGAAGGCCCTGAGAGGCGAGATCGCCCCTCTGAAGGAGAACGTGA |
| | GCCACGTGAACGACCTGGCCAGACAGCTGACCACCCTGGGAATCCAGCTGAGCCCCTA |
| | CAACCTGAGCACCCTGGAGGACCTGAACACGAGATGGAAGCTGCTGCAAGTGGCCGTG |
| | GAGGACAGAGTCAGACAGTTGCACGAGGCTCACAGAGATTTCGGCCCCGCTAGTCAGC |
| | ACTTCCTGAGCACCAGCGTGCAGGGCCCCTGGGAGAGAGCTATCAGCCCAAACAAGGT |
| | GCCCTACTACATCAACCACGAGACCCAGACCACCTGCTGGGACCACCCCAAGATGACC |
| | GAGCTGTACCAGAGCCTGGCAGACCTCAACAACGTGAGATTCAGCGCCTACAGAACCG |
| | CCATGAAGCTGAGAAGACTGCAGAAGGCCCTGTGCCTGGACCTGCTGAGCCTGAGCGC |
| | CGCCTGCGACGCCCTGGACCAGCACAACCTGAAGCAGAACGACCAGCCCATGGACATC |
| | CTTCAGATCATCAACTGCCTGACCACCATCTACGACAGACTGGAGCAGGAACATAACA |
| | ACCTGGTGAACGTGCCCCTGTGCGTGGACATGTGCCTGAACTGGCTGCTGAACGTGTA |
| | CGACACCGGCAGAACAGGCAGAATCAGAGTGCTGAGCTTCAAGACCGGCATCATCAGC |
| | CTGTGCAAGGCCCACCTGGAGGACAAGTACAGATACTTATTCAAGCAGGTGGCCAGCA |
| | GCACCGGCTTCTGCGATCAGAGAAGACTGGGCCTGCTGCTGCACGACAGCATCCAGAT |
| | CCCCAGACAGCTGGGCGAAGTGGCCAGCTTCGGCGGCAGCAACATCGAGCCCAGCGTG |
| | AGAAGCTGCTTCCAGTTCGCTAACAACAAGCCCGAGATCGAGGCCGCCCTGTTCTTGG |
| | ACTGGATGAGACTGGAGCCCCAGAGCATGGTGTGGCTGCCCGTGCTGCACAGAGTGGC |
| | CGCCGCCGAGACCGCCAAGCACCAGGCCAAGTGTAACATCTGCAAGGAGTGCCCAATC |
| | ATCGGCTTCAGATACAGAAGCCTGAAGCACTTCAACTACGACATCTGCCAGAGCTGCT |
| | TCTTCAGCGGCAGAGTGGCCAAGGGCCACAAGATGCACTACCCCATGGTGGAGTACTG |
| | CACCCCCACCACCAGCGGCGAGGACGTGAGAGACTTCGCAAAGGTCCTGAAGAACAAG |
| | TTCAGAACCAAGAGATACTTCGCTAAGCACCCCAGAATGGGCTACCTGCCCGTGCAGA |
| | CCGTGCTGGAGGGCGATAACATGGAGACCGACACCATGTGA (SEQ ID NO: |
| | 2405) |
| First DRG de- | TCATACAGCTAGATAACCAAAGA (SEQ ID NO: 2401) |
| targeting | |
| miRNA binding | |
| site | |
| Second DRG | TCATACAGCTAGATAACCAAAGA (SEQ ID NO: 2401) |
| de-targeting | |
| miRNA binding | |
| site | |
| Short polyA | AGGAATAAAATATCTTTATTTTCATTACATCTGTGTGTTGGTTTTTTGTGTG (SEQ |
| | ID NO: 2410) |
| AAV2 ITR | AGGAACCCCTAGTGATGGAGTTGGCCACTCCCTCTCTGCGCGCTCGCTCGCTCACTGA |
| | GGCCGGGCGACCAAAGGTCGCCCGACGCCCGGGCTTTGCCCGGGCGGCCTCAGTGAGC |
| | GAGCGAGCGCGC (SEQ ID NO: 2411) |

Nucleic acid 10
(SEQ ID NO: 2421)
GCGCGCTCGCTCGCTCACTGAGGCCGCCCGGGCAAAGCCCGGGCGTCGGGCGACCTTTGGTCGCCCGGCCTCAGT
GAGCGAGCGAGCGCGCAGAGAGGGAGTGGCCAACTCCATCACTAGGGGTTCCTTAGTTATTAATAGTAATCAATT
ACGGGGTCATTAGTTCATAGCCCATATATGGAGTTCCGCGTTACATAACTTACGGTAAATGGCCCGCCTGGCTGA
CCGCCCAACGACCCCCGCCCATTGACGTCAATAATGACGTATGTTCCCATAGTAACGCCAATAGGGACTTTCCAT
TGACGTCAATGGGTGGAGTATTTACGGTAAACTGCCCACTTGGCAGTACATCAAGTGTATCATATGCCAAGTACG
CCCCCTATTGACGTCAATGACGGTAAATGGCCCGCCTGGCATTATGCCCAGTACATGACCTTATGGGACTTTCCT
ACTTGGCAGTACATCTACGTATTAGTCATCGCTATTACCATGCTAGACTAGCATGCTGCCCATGTAAGGAGGCAA
GGCCTGGGGACACCCGAGATGCCTGGTTATAATTAACCCAGACATGTGGCTGCCCCCCCCCCCCAACACCTGCTG
CCTCTAAAAATAACCCTGCATGCCATGTTCCCGGCGAAGGGCCAGCTGTCCCCCGCCAGCTAGACTCAGCTCTCA
GGGGCCCCTCCCTGGGGACAGCCCCTCCTGGCTAGTCACACCCTGTAGGCTCCTCTATATAACCCAGGGGCACAG
GGGCTGCCCTCATTCTACCACCACCTCCACAGCACAGACAGACACTCAGGAGCCAGCCAGCCAGCCCAGGTACCT
GGGCAGGTAAGTATCAAGGTTACAAGACAGGTTTAAGGAGACCAATAGAAACTGGGCTTGTCGAGACAGAGAAGA
CTCTTGCGTTTCTGATAGGCACCTATTGGTCTTACTGACATCCACTTTGCCTTTCTCTCCACAGGTGTCCAGACT
AGTGCCACCATGCTGTGGTGGGAAGAGGTCGAGGACTGCTACGAGCGCGAAGATGTGCAGAAGAAAACTTTCACT
AAATGGGTGAATGCCCAGTTCTCTAAGTTCGGAAAGCAGCACATCGAAAACCTGTTTTCCGATCTGCAAGATGGC
CGGCGGCTGCTGGACCTGCTGGAGGGGCTGACCGGACAGAAGCTGCCTAAGGAGAAAGGATCTACCAGGGTCCAT
GCTCTGAATAACGTGAACAAGGCTCTGAGGGTGCTGCAGAACAATAACGTGGACCTGGTGAACATTGGTTCCACA
GACATCGTGGATGGAAACCACAAACTGACACTGGGACTGATCTGGAACATCATTCTGCATTGGCAAGTGAAGAAC
GTGATGAAGAACATCATGGCCGGACTGCAGCAGACGAACTCCGAGAAGATCCTGCTTAGCTGGGTGAGACAGAGT
ACCCGGAATTACCCACAGGTGAACGTGATCAATTTCACAACCAGCTGGTCAGACGGCCTGGCTCTGAATGCCCTG
ATTCATAGCCACCGGCCAGATCTGTTTGACTGGAACTCTGTCGTGTGTCAGCAGTCAGCCACCCAGAGGCTGGAG
CACGCCTTCAATATTGCCCGCTATCAGCTGGGGATTGAGAAACTGCTGGACCCCGAGGATGTGGACACAACATAC
CCTGACAAGAAGAGCATACTTATGTATATCACAAGCCTGTTCCAGGTGCTGCCACAGCAGGTCTCCATCGAGGCC
ATTCAAGAAGTGGAGATGCTGCCCAGGCCTCCTAAGGTCACCAAAGAGGAGCACTTTCAGCTCCATCATCAGATG
CACTACAGCCAGCAAATTACCGTGTCCCTGGCCCAGGGCTACGAGAGGACAAGTTCCCCCAAGCCTAGATTTAAG
AGCTATGCCTATACCCAGGCCGCCTACGTGACTACCTCCGATCCCACCAGGAGCCCATTTCCCAGCCAGCACCTG
GAGGCTCCCGAAGATAAGAGCTTTGGCAGCAGCCTGATGGAATCTGAGGTGAACCTGGACAGATACCAGACTGCG
CTGGAGGAGGTGCTGTCCTGGCTGCTGAGCGCCGAGGACACCCTGCAGGCTCAGGGCGAGATTAGTAATGATGTG
GAGGTGGTGAAGGATCAGTTTCACACTCACGAAGGCTACATGATGGACCTGACCGCCCACCAGGGCAGGGTGGGG
AACATTCTGCAGCTCGGGAGTAAGCTGATAGGGACCGGCAAACTGTCCGAGGATGAGGAAACCGAGGTGCAGGAG
CAGATGAACCTGCTTAACTCCCGGTGGGAGTGTCTGAGAGTGGCCAGCATGGAGAAGCAGAGCAATCTGCACAGA
GTGCTGATGGATCTGCAGAATCAGAAGCTGAAGGAACTGAATGATTGGCTCACAAAGACAGAGGAGAGGACTAGA
AAGATGGAGGAGGAGCCCCTGGGCCCTGACCTGGAGGACCTGAAGCGACAGGTGCAGCAGCACAAGGTGCTGCAG
GAGGATCTGGAGCAAGAACAAGTGAGGGTGAACTCTCTGACTCATATGGTTGTGGTGGTGGACGAGTCTTCCGGA
GACCACGCAACTGCCGCCCTCGAGGAGCAGCTGAAGGTGCTGGGCGATAGGTGGGCTAATATCTGTAGGTGGACC
GAGGACAGATGGGTGCTGCTGCAGGATATCCTGCTGAAATGGCAGCGCCTGACAGAAGAGCAGTGTCTGTTCAGC
GCATGGCTGAGCGAAAAGGAGGACGCTGTGAACAAGATCCACACTACAGGATTTAAAGACCAGAACGAGATGCTG
AGTAGCCTGCAGAAGCTGGCTGTGCTGAAGGCTGATTTGGAGAAAAAGAAGCAGAGCATGGGCAAGCTGTACTCC
CTGAAACAGGACCTGCTGAGCACCCTGAAGAATAAGTCCGTGACCCAGAAAACCGAAGCTTGGCTGGACAACTTC
GCGCGCTGCTGGGATAACCTGGTGCAGAAGCTGGAGAAGAGCACCGCCCAGATTTCTCAAGCAGTGACCACAACC
CAGCCCAGCCTGACCCAGACTACAGTAATGGAGACAGTCACTACCGTGACCACCCGGGAGCAGATCCTGGTGAAG
CACGCCCAGGAAGAGCTGCCGCCCCCACCACCCCAGAAAAAGCGGACCCTGGAGCGCCTGCAGGAGCTCCAGGAG
GCCACCGACGAACTGGATCTGAAGCTGAGGCAGGCCGAGGTGATTAAGGGATCCTGGCAGCCTGTGGGAGACCTG
CTGATCGACAGCCTGCAGGATCATCTGGAGAAAGTCAAAGCTCTGAGAGGGGAGATCGCCCCACTGAAGGAGAAC
GTGAGCCACGTGAATGACCTGGCTAGACAGCTGACCACCTTGGGCATTCAGCTGAGTCCTTACAATCTGTCAACT
CTGGAGGATCTGAACACCCGGTGGAAACTGCTGCAGGTGGCTGTGGAAGATCGGGTGCGCCAGTTACATGAGGCC
CACAGGGACTTTGGCCCAGCCTCACAGCACTTTCTGTCAACCTCTGTGCAAGGACCTTGGGAGAGAGCAATCAGC
CCAAACAAGGTGCCATATTATATCAATCATGAGACTCAGACAACTTGCTGGGATCACCCCAAGATGACAGAACTC
TATCAGTCACTCGCCGATCTCAATAATGTACGGTTCTCTGCCTACCGGACAGCTATGAAGCTGCGGAGGCTGCAG
AAGGCACTCTGTCTGGACCTGCTGAGTCTCTCTGCGGCCTGCGATGCCCTGGATCAACATAACCTGAAGCAGAAT
GATCAGCCTATGGACATCCTGCAGATCATTAACTGTCTCACCACAATCTACGATCGGCTGGAACAGGAACATAAC
AACCTGGTGAATGTGCCACTGTGTGTGGACATGTGCCTGAATTGGCTGCTCAACGTCTACGATACAGGCAGGACT
GGCAGGATCCGCGTGCTGAGCTTTAAAACCGGCATCATCTCTCTGTGCAAAGCCCACCTGGAGGACAAATATCGG
TACCTGTTTAAGCAGGTGGCCTCCAGCACAGGCTTCTGTGATCAGCGCCGGCTGGGCCTGCTGCTGCACGACAGC
ATTCAGATCCCTAGGCAGCTGGGCGAGGTGGCCTCCTTCGGCGGCTCAAACATTGAACCCAGCGTGAGATCTTGC
TTTCAGTTTGCAAATAATAAACCCGAGATCGAGGCCGCCCTGTTCCTGGATTGGATGAGACTGGAGCCTCAGAGT
ATGGTGTGGCTGCCAGTGCTGCATAGAGTGGCCGCCGCTGAGACGGCCAAGCACCAGGCAAAGTGCAATATCTGC
AAGGAATGCCCCATTATTGGCTTTCGATACCGGTCCTTGAAACACTTCAATTATGACATCTGCCAGTCATGCTTC
TTCAGCGGACGCGTGGCCAAGGGACACAAGATGCATTATCCTATGGTGGAATACTGCACTCCAACTACTTCCGGC
GAGGACGTGAGAGATTTCGCTAAAGTTCTTAAAAACAAATTTCGGACTAAGAGGTACTTCGCCAAGCACCCCCGC
ATGGGCTATCTGCCTGTGCAGACAGTGCTTGAAGGAGACAACATGGAAACCGATACAATGTGATAGATTCCAACA
AAATCACTGATGCTGGAAGATCAGCAACAAAATCACTGATGCTGGAAGACGCAGGAATAAAATATCTTTATTTTC
ATTACATCTGTGTGTTGGTTTTTTGTGTGAGGAACCCCTAGTGATGGAGTTGGCCACTCCCTCTCTGCGCGCTCG
CTCGCTCACTGAGGCCGGGCGACCAAAGGTCGCCCGACGCCCGGGCTTTGCCCGGGCGGCCTCAGTGAGCGAGCG
AGCGCGC

| Nucleic acid | |
|---|---|
| cargo 10 | |
| annotated | Sequence |
| AAV2 ITR | GCGCGCTCGCTCGCTCACTGAGGCCGCCCGGGCAAAGCCCGGGCGTCGGGCGACCTT |
| | TGGTCGCCCGGCCTCAGTGAGCGAGCGAGCGCGCAGAGAGGGAGTGGCCAACTCCAT |
| | CACTAGGGGTTCCT (SEQ ID NO: 2408) |
| Novel | TAGTTATTAATAGTAATCAATTACGGGGTCATTAGTTCATAGCCCATATATGGAGTT |
| promoter | CCGCGTTACATAACTTACGGTAAATGGCCCGCCTGGCTGACCGCCCAACGACCCCCG |
| | CCCATTGACGTCAATAATGACGTATGTTCCCATAGTAACGCCAATAGGGACTTTCCA |
| | TTGACGTCAATGGGTGGAGTATTTACGGTAAACTGCCCACTTGGCAGTACATCAAGT |
| | GTATCATATGCCAAGTACGCCCCCTATTGACGTCAATGACGGTAAATGGCCCGCCTG |
| | GCATTATGCCCAGTACATGACCTTATGGGACTTTCCTACTTGGCAGTACATCTACGT |
| | ATTAGTCATCGCTATTACCATGCTAGACTAGCATGCTGCCCATGTAAGGAGGCAAGG |
| | CCTGGGGACACCCGAGATGCCTGGTTATAATTAACCCAGACATGTGGCTGCCCCCCC |
| | CCCCCAACACCTGCTGCCTCTAAAAATAACCCTGCATGCCATGTTCCCGGCGAAGGG |
| | CCAGCTGTCCCCCGCCAGCTAGACTCAGCTCTCAGGGGCCCCTCCCTGGGGACAGCC |
| | CCTCCTGGCTAGTCACACCCTGTAGGCTCCTCTATATAACCCAGGGGCACAGGGGCT |
| | GCCCTCATTCTACCACCACCTCCACAGCACAGACAGACACTCAGGAGCCAGCCAGC |
| | (SEQ ID NO: 2402) |
| Intron | GTAAGTATCAAGGTTACAAGACAGGTTTAAGGAGACCAATAGAAACTGGGCTTGTCG |
| | AGACAGAGAAGACTCTTGCGTTTCTGATAGGCACCTATTGGTCTTACTGACATCCAC |
| | TTTGCCTTTCTCTCCACAG (SEQ ID NO: 2409) |
| Codon | ATGCTGTGGTGGGAAGAGGTCGAGGACTGCTACGAGCGCGAAGATGTGCAGAAGAAA |
| optimized | ACTTTCACTAAATGGGTGAATGCCCAGTTCTCTAAGTTCGGAAAGCAGCACATCGAA |
| microdystroph | AACCTGTTTTCCGATCTGCAAGATGGCCGGCGGCTGCTGGACCTGCTGGAGGGGCTG |
| in coding | ACCGGACAGAAGCTGCCTAAGGAGAAAGGATCTACCAGGGTCCATGCTCTGAATAAC |
| sequence | GTGAACAAGGCTCTGAGGGTGCTGCAGAACAATAACGTGGACCTGGTGAACATTGGT |
| | TCCACAGACATCGTGGATGGAAACCACAAACTGACACTGGGACTGATCTGGAACATC |
| | ATTCTGCATTGGCAAGTGAAGAACGTGATGAAGAACATCATGGCCGGACTGCAGCAG |
| | ACGAACTCCGAGAAGATCCTGCTTAGCTGGGTGAGACAGAGTACCCGGAATTACCCA |
| | CAGGTGAACGTGATCAATTTCACAACCAGCTGGTCAGACGGCCTGGCTCTGAATGCC |
| | CTGATTCATAGCCACCGGCCAGATCTGTTTGACTGGAACTCTGTCGTGTGTCAGCAG |
| | TCAGCCACCCAGAGGCTGGAGCACGCCTTCAATATTGCCCGCTATCAGCTGGGGATT |
| | GAGAAACTGCTGGACCCCGAGGATGTGGACACAACATACCCTGACAAGAAGAGCATA |
| | CTTATGTATATCACAAGCCTGTTCCAGGTGCTGCCACAGCAGGTCTCCATCGAGGCC |
| | ATTCAAGAAGTGGAGATGCTGCCCAGGCCTCCTAAGGTCACCAAAGAGGAGCACTTT |
| | CAGCTCCATCATCAGATGCACTACAGCCAGCAAATTACCGTGTCCCTGGCCCAGGGC |
| | TACGAGAGGACAAGTTCCCCCAAGCCTAGATTTAAGAGCTATGCCTATACCCAGGCC |
| | GCCTACGTGACTACCTCCGATCCCACCAGGAGCCCATTTCCCAGCCAGCACCTGGAG |
| | GCTCCCGAAGATAAGAGCTTTGGCAGCAGCCTGATGGAATCTGAGGTGAACCTGGAC |
| | AGATACCAGACTGCGCTGGAGGAGGTGCTGTCCTGGCTGCTGAGCGCCGAGGACACC |
| | CTGCAGGCTCAGGGCGAGATTAGTAATGATGTGGAGGTGGTGAAGGATCAGTTTCAC |
| | ACTCACGAAGGCTACATGATGGACCTGACCGCCCACCAGGGCAGGGTGGGGAACATT |
| | CTGCAGCTCGGGAGTAAGCTGATAGGGACCGGCAAACTGTCCGAGGATGAGGAAACC |
| | GAGGTGCAGGAGCAGATGAACCTGCTTAACTCCCGGTGGGAGTGTCTGAGAGTGGCC |
| | AGCATGGAGAAGCAGAGCAATCTGCACAGAGTGCTGATGGATCTGCAGAATCAGAAG |
| | CTGAAGGAACTGAATGATTGGCTCACAAAGACAGAGGAGAGGACTAGAAAGATGGAG |
| | GAGGAGCCCCTGGGCCCTGACCTGGAGGACCTGAAGCGACAGGTGCAGCAGCACAAG |
| | GTGCTGCAGGAGGATCTGGAGCAAGAACAAGTGAGGGTGAACTCTCTGACTCATATG |
| | GTTGTGGTGGTGGACGAGTCTTCCGGAGACCACGCAACTGCCGCCCTCGAGGAGCAG |
| | CTGAAGGTGCTGGGCGATAGGTGGGCTAATATCTGTAGGTGGACCGAGGACAGATGG |
| | GTGCTGCTGCAGGATATCCTGCTGAAATGGCAGCGCCTGACAGAAGAGCAGTGTCTG |
| | TTCAGCGCATGGCTGAGCGAAAAGGAGGACGCTGTGAACAAGATCCACACTACAGGA |
| | TTTAAAGACCAGAACGAGATGCTGAGTAGCCTGCAGAAGCTGGCTGTGCTGAAGGCT |
| | GATTTGGAGAAAAAGAAGCAGAGCATGGGCAAGCTGTACTCCCTGAAACAGGACCTG |
| | CTGAGCACCCTGAAGAATAAGTCCGTGACCCAGAAAACCGAAGCTTGGCTGGACAAC |
| | TTCGCGCGCTGCTGGGATAACCTGGTGCAGAAGCTGGAGAAGAGCACCGCCCAGATT |
| | TCTCAAGCAGTGACCACAACCCAGCCCAGCCTGACCCAGACTACAGTAATGGAGACA |
| | GTCACTACCGTGACCACCCGGGAGCAGATCCTGGTGAAGCACGCCCAGGAAGAGCTG |
| | CCGCCCCCACCACCCCAGAAAAAGCGGACCCTGGAGCGCCTGCAGGAGCTCCAGGAG |
| | GCCACCGACGAACTGGATCTGAAGCTGAGGCAGGCCGAGGTGATTAAGGGATCCTGG |
| | CAGCCTGTGGGAGACCTGCTGATCGACAGCCTGCAGGATCATCTGGAGAAAGTCAAA |
| | GCTCTGAGAGGGGAGATCGCCCCACTGAAGGAGAACGTGAGCCACGTGAATGACCTG |
| | GCTAGACAGCTGACCACCTTGGGCATTCAGCTGAGTCCTTACAATCTGTCAACTCTG |
| | GAGGATCTGAACACCCGGTGGAAACTGCTGCAGGTGGCTGTGGAAGATCGGGTGCGC |
| | CAGTTACATGAGGCCCACAGGGACTTTGGCCCAGCCTCACAGCACTTTCTGTCAACC |
| | TCTGTGCAAGGACCTTGGGAGAGAGCAATCAGCCCAAACAAGGTGCCATATTATATC |
| | AATCATGAGACTCAGACAACTTGCTGGGATCACCCCAAGATGACAGAACTCTATCAG |
| | TCACTCGCCGATCTCAATAATGTACGGTTCTCTGCCTACCGGACAGCTATGAAGCTG |
| | CGGAGGCTGCAGAAGGCACTCTGTCTGGACCTGCTGAGTCTCTCTGCGGCCTGCGAT |
| | GCCCTGGATCAACATAACCTGAAGCAGAATGATCAGCCTATGGACATCCTGCAGATC |
| | ATTAACTGTCTCACCACAATCTACGATCGGCTGGAACAGGAACATAACAACCTGGTG |
| | AATGTGCCACTGTGTGTGGACATGTGCCTGAATTGGCTGCTCAACGTCTACGATACA |
| | GGCAGGACTGGCAGGATCCGCGTGCTGAGCTTTAAAACCGGCATCATCTCTCTGTGC |
| | AAAGCCCACCTGGAGGACAAATATCGGTACCTGTTTAAGCAGGTGGCCTCCAGCACA |
| | GGCTTCTGTGATCAGCGCCGGCTGGGCCTGCTGCTGCACGACAGCATTCAGATCCCT |
| | AGGCAGCTGGGCGAGGTGGCCTCCTTCGGCGGCTCAAACATTGAACCCAGCGTGAGA |
| | TCTTGCTTTCAGTTTGCAAATAATAAACCCGAGATCGAGGCCGCCCTGTTCCTGGAT |
| | TGGATGAGACTGGAGCCTCAGAGTATGGTGTGGCTGCCAGTGCTGCATAGAGTGGCC |
| | GCCGCTGAGACGGCCAAGCACCAGGCAAAGTGCAATATCTGCAAGGAATGCCCCATT |
| | ATTGGCTTTCGATACCGGTCCTTGAAACACTTCAATTATGACATCTGCCAGTCATGC |
| | TTCTTCAGCGGACGCGTGGCCAAGGGACACAAGATGCATTATCCTATGGTGGAATAC |
| | TGCACTCCAACTACTTCCGGCGAGGACGTGAGAGATTTCGCTAAAGTTCTTAAAAAC |
| | AAATTTCGGACTAAGAGGTACTTCGCCAAGCACCCCCGCATGGGCTATCTGCCTGTG |
| | CAGACAGTGCTTGAAGGAGACAACATGGAAACCGATACAATGTGA (SEQ ID NO: |
| | 2406) |
| First DRG de- | CAACAAAATCACTGATGCTGGA (SEQ ID NO: 2399) |
| targeting | |
| miRNA binding | |
| site | |
| Second DRG | CAACAAAATCACTGATGCTGGA (SEQ ID NO: 2399) |
| de-targeting | |
| miRNA binding | |
| site | |
| Short polyA | AGGAATAAAATATCTTTATTTTCATTACATCTGTGTGTTGGTTTTTTGTGTG (SEQ |
| | ID NO: 2410) |
| AAV2 ITR | AGGAACCCCTAGTGATGGAGTTGGCCACTCCCTCTCTGCGCGCTCGCTCGCTCACTG |
| | AGGCCGGGCGACCAAAGGTCGCCCGACGCCCGGGCTTTGCCCGGGCGGCCTCAGTGA |
| | GCGAGCGAGCGCGC (SEQ ID NO: 2411) |

Nucleic acid 11
(SEQ ID NO: 2422)
GCGCGCTCGCTCGCTCACTGAGGCCGCCCGGGCAAAGCCCGGGCGTCGGGCGACCTTTGGTCGCCCGGCCTCAGT
GAGCGAGCGAGCGCGCAGAGAGGGAGTGGCCAACTCCATCACTAGGGGTTCCTCGTCTGTCTAATTCCAGCCAAG
GGCATGGGGGAAAGGACAGAGCCCAGGGACCTGTGGCCTATTCTCTGAGAGGACGCTGGGCTAATAATAGGAGGG
GAGATTAGGGAGGGATTTGACTGCATTGTTATCTCACAGGAATGGCGTTTGAGAGCCTTGCTTCCAAGCTCTTCC
AAGAGTCATGCCACCCCCCTCCAATCTCTGTGGAAGTGCCCACTGCCTTTCCCGCTTCGTTCTCTTCTCTCTAAA
TCTGAGCCCACCCCACTCAGGGGTACAGGATCTGGTTCATTTATCTCCCAGAATGATGCCTTGGGTTGCGTCCCC
TCTAAACTCTGGCACATTCCAGCCCCTCTTTGGGAGAAAGAACATCTCTTCTTGCCCAGGCCCTAGTGAGACATG
CATCGCAAGACATGCTCCCCCCTTCCTCCCCGCTGGGCTCCAGCTGCTGCCAGCCCTCCAAGAAAGGAGAGGCCC
TGAGTTGGGCTATTTTGGTATCTGGGGTGGGCACCCGCAGGGCTAAGGTTACCTTGGTATGTTAAGGGCTCCCTG
GGGCAGGACTATATAACCCCAGAGGGACTGCCCCATGCTGACTCCTTGCTTCTTTCCTGCTCGAGCCGCTGCCTT
GCCCCCCGGAGACTGAAGACACAGCCCAGGTACCTGGGCAGGTAAGTATCAAGGTTACAAGACAGGTTTAAGGAG
ACCAATAGAAACTGGGCTTGTCGAGACAGAGAAGACTCTTGCGTTTCTGATAGGCACCTATTGGTCTTACTGACA
TCCACTTTGCCTTTCTCTCCACAGGTGTCCAGACTAGTGCCACCATGCTGTGGTGGGAAGAGGTCGAGGACTGCT
ACGAGCGCGAAGATGTGCAGAAGAAAACTTTCACTAAATGGGTGAATGCCCAGTTCTCTAAGTTCGGAAAGCAGC
ACATCGAAAACCTGTTTTCCGATCTGCAAGATGGCCGGCGGCTGCTGGACCTGCTGGAGGGGCTGACCGGACAGA
AGCTGCCTAAGGAGAAAGGATCTACCAGGGTCCATGCTCTGAATAACGTGAACAAGGCTCTGAGGGTGCTGCAGA
ACAATAACGTGGACCTGGTGAACATTGGTTCCACAGACATCGTGGATGGAAACCACAAACTGACACTGGGACTGA
TCTGGAACATCATTCTGCATTGGCAAGTGAAGAACGTGATGAAGAACATCATGGCCGGACTGCAGCAGACGAACT
CCGAGAAGATCCTGCTTAGCTGGGTGAGACAGAGTACCCGGAATTACCCACAGGTGAACGTGATCAATTTCACAA
CCAGCTGGTCAGACGGCCTGGCTCTGAATGCCCTGATTCATAGCCACCGGCCAGATCTGTTTGACTGGAACTCTG
TCGTGTGTCAGCAGTCAGCCACCCAGAGGCTGGAGCACGCCTTCAATATTGCCCGCTATCAGCTGGGGATTGAGA
AACTGCTGGACCCCGAGGATGTGGACACAACATACCCTGACAAGAAGAGCATACTTATGTATATCACAAGCCTGT
TCCAGGTGCTGCCACAGCAGGTCTCCATCGAGGCCATTCAAGAAGTGGAGATGCTGCCCAGGCCTCCTAAGGTCA
CCAAAGAGGAGCACTTTCAGCTCCATCATCAGATGCACTACAGCCAGCAAATTACCGTGTCCCTGGCCCAGGGCT
ACGAGAGGACAAGTTCCCCCAAGCCTAGATTTAAGAGCTATGCCTATACCCAGGCCGCCTACGTGACTACCTCCG
ATCCCACCAGGAGCCCATTTCCCAGCCAGCACCTGGAGGCTCCCGAAGATAAGAGCTTTGGCAGCAGCCTGATGG
AATCTGAGGTGAACCTGGACAGATACCAGACTGCGCTGGAGGAGGTGCTGTCCTGGCTGCTGAGCGCCGAGGACA
CCCTGCAGGCTCAGGGCGAGATTAGTAATGATGTGGAGGTGGTGAAGGATCAGTTTCACACTCACGAAGGCTACA
TGATGGACCTGACCGCCCACCAGGGCAGGGTGGGGAACATTCTGCAGCTCGGGAGTAAGCTGATAGGGACCGGCA
AACTGTCCGAGGATGAGGAAACCGAGGTGCAGGAGCAGATGAACCTGCTTAACTCCCGGTGGGAGTGTCTGAGAG
TGGCCAGCATGGAGAAGCAGAGCAATCTGCACAGAGTGCTGATGGATCTGCAGAATCAGAAGCTGAAGGAACTGA
ATGATTGGCTCACAAAGACAGAGGAGAGGACTAGAAAGATGGAGGAGGAGCCCCTGGGCCCTGACCTGGAGGACC
TGAAGCGACAGGTGCAGCAGCACAAGGTGCTGCAGGAGGATCTGGAGCAAGAACAAGTGAGGGTGAACTCTCTGA
CTCATATGGTTGTGGTGGTGGACGAGTCTTCCGGAGACCACGCAACTGCCGCCCTCGAGGAGCAGCTGAAGGTGC
TGGGCGATAGGTGGGCTAATATCTGTAGGTGGACCGAGGACAGATGGGTGCTGCTGCAGGATATCCTGCTGAAAT
GGCAGCGCCTGACAGAAGAGCAGTGTCTGTTCAGCGCATGGCTGAGCGAAAAGGAGGACGCTGTGAACAAGATCC
ACACTACAGGATTTAAAGACCAGAACGAGATGCTGAGTAGCCTGCAGAAGCTGGCTGTGCTGAAGGCTGATTTGG
AGAAAAAGAAGCAGAGCATGGGCAAGCTGTACTCCCTGAAACAGGACCTGCTGAGCACCCTGAAGAATAAGTCCG
TGACCCAGAAAACCGAAGCTTGGCTGGACAACTTCGCGCGCTGCTGGGATAACCTGGTGCAGAAGCTGGAGAAGA
GCACCGCCCAGATTTCTCAAGCAGTGACCACAACCCAGCCCAGCCTGACCCAGACTACAGTAATGGAGACAGTCA
CTACCGTGACCACCCGGGAGCAGATCCTGGTGAAGCACGCCCAGGAAGAGCTGCCGCCCCCACCACCCCAGAAAA
AGCGGACCCTGGAGCGCCTGCAGGAGCTCCAGGAGGCCACCGACGAACTGGATCTGAAGCTGAGGCAGGCCGAGG
TGATTAAGGGATCCTGGCAGCCTGTGGGAGACCTGCTGATCGACAGCCTGCAGGATCATCTGGAGAAAGTCAAAG
CTCTGAGAGGGGAGATCGCCCCACTGAAGGAGAACGTGAGCCACGTGAATGACCTGGCTAGACAGCTGACCACCT
TGGGCATTCAGCTGAGTCCTTACAATCTGTCAACTCTGGAGGATCTGAACACCCGGTGGAAACTGCTGCAGGTGG
CTGTGGAAGATCGGGTGCGCCAGTTACATGAGGCCCACAGGGACTTTGGCCCAGCCTCACAGCACTTTCTGTCAA
CCTCTGTGCAAGGACCTTGGGAGAGAGCAATCAGCCCAAACAAGGTGCCATATTATATCAATCATGAGACTCAGA
CAACTTGCTGGGATCACCCCAAGATGACAGAACTCTATCAGTCACTCGCCGATCTCAATAATGTACGGTTCTCTG
CCTACCGGACAGCTATGAAGCTGCGGAGGCTGCAGAAGGCACTCTGTCTGGACCTGCTGAGTCTCTCTGCGGCCT
GCGATGCCCTGGATCAACATAACCTGAAGCAGAATGATCAGCCTATGGACATCCTGCAGATCATTAACTGTCTCA
CCACAATCTACGATCGGCTGGAACAGGAACATAACAACCTGGTGAATGTGCCACTGTGTGTGGACATGTGCCTGA
ATTGGCTGCTCAACGTCTACGATACAGGCAGGACTGGCAGGATCCGCGTGCTGAGCTTTAAAACCGGCATCATCT
CTCTGTGCAAAGCCCACCTGGAGGACAAATATCGGTACCTGTTTAAGCAGGTGGCCTCCAGCACAGGCTTCTGTG
ATCAGCGCCGGCTGGGCCTGCTGCTGCACGACAGCATTCAGATCCCTAGGCAGCTGGGCGAGGTGGCCTCCTTCG
GCGGCTCAAACATTGAACCCAGCGTGAGATCTTGCTTTCAGTTTGCAAATAATAAACCCGAGATCGAGGCCGCCC
TGTTCCTGGATTGGATGAGACTGGAGCCTCAGAGTATGGTGTGGCTGCCAGTGCTGCATAGAGTGGCCGCCGCTG
AGACGGCCAAGCACCAGGCAAAGTGCAATATCTGCAAGGAATGCCCCATTATTGGCTTTCGATACCGGTCCTTGA
AACACTTCAATTATGACATCTGCCAGTCATGCTTCTTCAGCGGACGCGTGGCCAAGGGACACAAGATGCATTATC
CTATGGTGGAATACTGCACTCCAACTACTTCCGGCGAGGACGTGAGAGATTTCGCTAAAGTTCTTAAAAACAAAT
TTCGGACTAAGAGGTACTTCGCCAAGCACCCCCGCATGGGCTATCTGCCTGTGCAGACAGTGCTTGAAGGAGACA
ACATGGAAACCGATACAATGTGATAGATTCCAACAAAATCACTGATGCTGGAAGATCAGCAACAAAATCACTGAT
GCTGGAAGACGCAGGAATAAAATATCTTTATTTTCATTACATCTGTGTGTTGGTTTTTTGTGTGAGGAACCCCTA
GTGATGGAGTTGGCCACTCCCTCTCTGCGCGCTCGCTCGCTCACTGAGGCCGGGCGACCAAAGGTCGCCCGACGC
CCGGGCTTTGCCCGGGCGGCCTCAGTGAGCGAGCGAGCGCGC

| Nucleic acid | |
|---|---|
| cargo 11 | |
| annotated | Sequence |
| AAV2 ITR | GCGCGCTCGCTCGCTCACTGAGGCCGCCCGGGCAAAGCCCGGGCGTCGGGCGACCTTT |
| | GGTCGCCCGGCCTCAGTGAGCGAGCGAGCGCGCAGAGAGGGAGTGGCCAACTCCATCA |
| | CTAGGGGTTCCT (SEQ ID NO: 2408) |
| Novel | CGTCTGTCTAATTCCAGCCAAGGGCATGGGGGAAAGGACAGAGCCCAGGGACCTGTGG |
| promoter | CCTATTCTCTGAGAGGACGCTGGGCTAATAATAGGAGGGGAGATTAGGGAGGGATTTG |
| | ACTGCATTGTTATCTCACAGGAATGGCGTTTGAGAGCCTTGCTTCCAAGCTCTTCCAA |
| | GAGTCATGCCACCCCCCTCCAATCTCTGTGGAAGTGCCCACTGCCTTTCCCGCTTCGT |
| | TCTCTTCTCTCTAAATCTGAGCCCACCCCACTCAGGGGTACAGGATCTGGTTCATTTA |
| | TCTCCCAGAATGATGCCTTGGGTTGCGTCCCCTCTAAACTCTGGCACATTCCAGCCCC |
| | TCTTTGGGAGAAAGAACATCTCTTCTTGCCCAGGCCCTAGTGAGACATGCATCGCAAG |
| | ACATGCTCCCCCCTTCCTCCCCGCTGGGCTCCAGCTGCTGCCAGCCCTCCAAGAAAGG |
| | AGAGGCCCTGAGTTGGGCTATTTTGGTATCTGGGGTGGGCACCCGCAGGGCTAAGGTT |
| | ACCTTGGTATGTTAAGGGCTCCCTGGGGCAGGACTATATAACCCCAGAGGGACTGCCC |
| | CATGCTGACTCCTTGCTTCTTTCCTGCTCGAGCCGCTGCCTTGCCCCCCGGAGACTGA |
| | AGACA (SEQ ID NO: 2403) |
| Intron | GTAAGTATCAAGGTTACAAGACAGGTTTAAGGAGACCAATAGAAACTGGGCTTGTCGA |
| | GACAGAGAAGACTCTTGCGTTTCTGATAGGCACCTATTGGTCTTACTGACATCCACTT |
| | TGCCTTTCTCTCCACAG (SEQ ID NO: 2409) |
| Codon | ATGCTGTGGTGGGAAGAGGTCGAGGACTGCTACGAGCGCGAAGATGTGCAGAAGAAAA |
| optimized | CTTTCACTAAATGGGTGAATGCCCAGTTCTCTAAGTTCGGAAAGCAGCACATCGAAAA |
| microdystroph | CCTGTTTTCCGATCTGCAAGATGGCCGGCGGCTGCTGGACCTGCTGGAGGGGCTGACC |
| in coding | GGACAGAAGCTGCCTAAGGAGAAAGGATCTACCAGGGTCCATGCTCTGAATAACGTGA |
| sequence | ACAAGGCTCTGAGGGTGCTGCAGAACAATAACGTGGACCTGGTGAACATTGGTTCCAC |
| | AGACATCGTGGATGGAAACCACAAACTGACACTGGGACTGATCTGGAACATCATTCTG |
| | CATTGGCAAGTGAAGAACGTGATGAAGAACATCATGGCCGGACTGCAGCAGACGAACT |
| | CCGAGAAGATCCTGCTTAGCTGGGTGAGACAGAGTACCCGGAATTACCCACAGGTGAA |
| | CGTGATCAATTTCACAACCAGCTGGTCAGACGGCCTGGCTCTGAATGCCCTGATTCAT |
| | AGCCACCGGCCAGATCTGTTTGACTGGAACTCTGTCGTGTGTCAGCAGTCAGCCACCC |
| | AGAGGCTGGAGCACGCCTTCAATATTGCCCGCTATCAGCTGGGGATTGAGAAACTGCT |
| | GGACCCCGAGGATGTGGACACAACATACCCTGACAAGAAGAGCATACTTATGTATATC |
| | ACAAGCCTGTTCCAGGTGCTGCCACAGCAGGTCTCCATCGAGGCCATTCAAGAAGTGG |
| | AGATGCTGCCCAGGCCTCCTAAGGTCACCAAAGAGGAGCACTTTCAGCTCCATCATCA |
| | GATGCACTACAGCCAGCAAATTACCGTGTCCCTGGCCCAGGGCTACGAGAGGACAAGT |
| | TCCCCCAAGCCTAGATTTAAGAGCTATGCCTATACCCAGGCCGCCTACGTGACTACCT |
| | CCGATCCCACCAGGAGCCCATTTCCCAGCCAGCACCTGGAGGCTCCCGAAGATAAGAG |
| | CTTTGGCAGCAGCCTGATGGAATCTGAGGTGAACCTGGACAGATACCAGACTGCGCTG |
| | GAGGAGGTGCTGTCCTGGCTGCTGAGCGCCGAGGACACCCTGCAGGCTCAGGGCGAGA |
| | TTAGTAATGATGTGGAGGTGGTGAAGGATCAGTTTCACACTCACGAAGGCTACATGAT |
| | GGACCTGACCGCCCACCAGGGCAGGGTGGGGAACATTCTGCAGCTCGGGAGTAAGCTG |
| | ATAGGGACCGGCAAACTGTCCGAGGATGAGGAAACCGAGGTGCAGGAGCAGATGAACC |
| | TGCTTAACTCCCGGTGGGAGTGTCTGAGAGTGGCCAGCATGGAGAAGCAGAGCAATCT |
| | GCACAGAGTGCTGATGGATCTGCAGAATCAGAAGCTGAAGGAACTGAATGATTGGCTC |
| | ACAAAGACAGAGGAGAGGACTAGAAAGATGGAGGAGGAGCCCCTGGGCCCTGACCTGG |
| | AGGACCTGAAGCGACAGGTGCAGCAGCACAAGGTGCTGCAGGAGGATCTGGAGCAAGA |
| | ACAAGTGAGGGTGAACTCTCTGACTCATATGGTTGTGGTGGTGGACGAGTCTTCCGGA |
| | GACCACGCAACTGCCGCCCTCGAGGAGCAGCTGAAGGTGCTGGGCGATAGGTGGGCTA |
| | ATATCTGTAGGTGGACCGAGGACAGATGGGTGCTGCTGCAGGATATCCTGCTGAAATG |
| | GCAGCGCCTGACAGAAGAGCAGTGTCTGTTCAGCGCATGGCTGAGCGAAAAGGAGGAC |
| | GCTGTGAACAAGATCCACACTACAGGATTTAAAGACCAGAACGAGATGCTGAGTAGCC |
| | TGCAGAAGCTGGCTGTGCTGAAGGCTGATTTGGAGAAAAAGAAGCAGAGCATGGGCAA |
| | GCTGTACTCCCTGAAACAGGACCTGCTGAGCACCCTGAAGAATAAGTCCGTGACCCAG |
| | AAAACCGAAGCTTGGCTGGACAACTTCGCGCGCTGCTGGGATAACCTGGTGCAGAAGC |
| | TGGAGAAGAGCACCGCCCAGATTTCTCAAGCAGTGACCACAACCCAGCCCAGCCTGAC |
| | CCAGACTACAGTAATGGAGACAGTCACTACCGTGACCACCCGGGAGCAGATCCTGGTG |
| | AAGCACGCCCAGGAAGAGCTGCCGCCCCCACCACCCCAGAAAAAGCGGACCCTGGAGC |
| | GCCTGCAGGAGCTCCAGGAGGCCACCGACGAACTGGATCTGAAGCTGAGGCAGGCCGA |
| | GGTGATTAAGGGATCCTGGCAGCCTGTGGGAGACCTGCTGATCGACAGCCTGCAGGAT |
| | CATCTGGAGAAAGTCAAAGCTCTGAGAGGGGAGATCGCCCCACTGAAGGAGAACGTGA |
| | GCCACGTGAATGACCTGGCTAGACAGCTGACCACCTTGGGCATTCAGCTGAGTCCTTA |
| | CAATCTGTCAACTCTGGAGGATCTGAACACCCGGTGGAAACTGCTGCAGGTGGCTGTG |
| | GAAGATCGGGTGCGCCAGTTACATGAGGCCCACAGGGACTTTGGCCCAGCCTCACAGC |
| | ACTTTCTGTCAACCTCTGTGCAAGGACCTTGGGAGAGAGCAATCAGCCCAAACAAGGT |
| | GCCATATTATATCAATCATGAGACTCAGACAACTTGCTGGGATCACCCCAAGATGACA |
| | GAACTCTATCAGTCACTCGCCGATCTCAATAATGTACGGTTCTCTGCCTACCGGACAG |
| | CTATGAAGCTGCGGAGGCTGCAGAAGGCACTCTGTCTGGACCTGCTGAGTCTCTCTGC |
| | GGCCTGCGATGCCCTGGATCAACATAACCTGAAGCAGAATGATCAGCCTATGGACATC |
| | CTGCAGATCATTAACTGTCTCACCACAATCTACGATCGGCTGGAACAGGAACATAACA |
| | ACCTGGTGAATGTGCCACTGTGTGTGGACATGTGCCTGAATTGGCTGCTCAACGTCTA |
| | CGATACAGGCAGGACTGGCAGGATCCGCGTGCTGAGCTTTAAAACCGGCATCATCTCT |
| | CTGTGCAAAGCCCACCTGGAGGACAAATATCGGTACCTGTTTAAGCAGGTGGCCTCCA |
| | GCACAGGCTTCTGTGATCAGCGCCGGCTGGGCCTGCTGCTGCACGACAGCATTCAGAT |
| | CCCTAGGCAGCTGGGCGAGGTGGCCTCCTTCGGCGGCTCAAACATTGAACCCAGCGTG |
| | AGATCTTGCTTTCAGTTTGCAAATAATAAACCCGAGATCGAGGCCGCCCTGTTCCTGG |
| | ATTGGATGAGACTGGAGCCTCAGAGTATGGTGTGGCTGCCAGTGCTGCATAGAGTGGC |
| | CGCCGCTGAGACGGCCAAGCACCAGGCAAAGTGCAATATCTGCAAGGAATGCCCCATT |
| | ATTGGCTTTCGATACCGGTCCTTGAAACACTTCAATTATGACATCTGCCAGTCATGCT |
| | TCTTCAGCGGACGCGTGGCCAAGGGACACAAGATGCATTATCCTATGGTGGAATACTG |
| | CACTCCAACTACTTCCGGCGAGGACGTGAGAGATTTCGCTAAAGTTCTTAAAAACAAA |
| | TTTCGGACTAAGAGGTACTTCGCCAAGCACCCCCGCATGGGCTATCTGCCTGTGCAGA |
| | CAGTGCTTGAAGGAGACAACATGGAAACCGATACAATGTGA (SEQ ID NO: |
| | 2406) |
| First DRG de- | CAACAAAATCACTGATGCTGGA (SEQ ID NO: 2399) |
| targeting | |
| miRNA binding | |
| site | |
| Second DRG | CAACAAAATCACTGATGCTGGA (SEQ ID NO: 2399) |
| de-targeting | |
| miRNA binding | |
| site | |
| Short polyA | AGGAATAAAATATCTTTATTTTCATTACATCTGTGTGTTGGTTTTTTGTGTG (SEQ |
| | ID NO: 2410) |
| AAV2 ITR | AGGAACCCCTAGTGATGGAGTTGGCCACTCCCTCTCTGCGCGCTCGCTCGCTCACTGA |
| | GGCCGGGCGACCAAAGGTCGCCCGACGCCCGGGCTTTGCCCGGGCGGCCTCAGTGAGC |
| | GAGCGAGCGCGC (SEQ ID NO: 2411) |

Nucleic acid 12
(SEQ ID NO: 2423)
GCGCGCTCGCTCGCTCACTGAGGCCGCCCGGGCAAAGCCCGGGCGTCGGGCGACCTTTGGTCGCCCGGCCTCAGT
GAGCGAGCGAGCGCGCAGAGAGGGAGTGGCCAACTCCATCACTAGGGGTTCCTCGTCTGTCTAATTCCAGCCAAG
GGCATGGGGGAAAGGACAGAGCCCAGGGACCTGTGGCCTATTCTCTGAGAGGACGCTGGGCTAATAATAGGAGGG
GAGATTAGGGAGGGATTTGACTGCATTGTTATCTCACAGGAATGGCGTTTGAGAGCCTTGCTTCCAAGCTCTTCC
AAGAGTCATGCCACCCCCCTCCAATCTCTGTGGAAGTGCCCACTGCCTTTCCCGCTTCGTTCTCTTCTCTCGGTC
CCATCCCTGACCCACTAGCCTGGTGCCGGGGGGAGACCAATTTCTGGAGGAAGCTCTGGGTACCCAGTCTTGCCC
TAAGCCTGCCTCTGAACAGGCTGTTCTTGTTTATGACCCCCGTCCCAGCAGAATAGTGATTGCTCATCCCTGCAT
GTGATTTGAGAGGGCCAGTCTTTCAGGCCTGGAGGAAACTCAAGCCCCACCAGCCGCTTGGCATCGGAATGCTCA
GCTGGTCCCCTCCTGGGGCTCATGTGACCAAGATCTAGCTATAAATATCAGAGGGGCCTCAGACCAAGACAGAAT
TCGGGCACCAGGAGAAGGAAGCCAACAGGATCCGACCCGGTGTTTTGTGACAAAGGCAAGACCCCCAGGTCTACT
TAGAGCAACGTTAGTAGAGGACAGCCCAGGTACCTGGGCAGGTAAGTATCAAGGTTACAAGACAGGTTTAAGGAG
ACCAATAGAAACTGGGCTTGTCGAGACAGAGAAGACTCTTGCGTTTCTGATAGGCACCTATTGGTCTTACTGACA
TCCACTTTGCCTTTCTCTCCACAGGTGTCCAGACTAGTGCCACCATGCTGTGGTGGGAAGAGGTCGAGGACTGCT
ACGAGCGCGAAGATGTGCAGAAGAAAACTTTCACTAAATGGGTGAATGCCCAGTTCTCTAAGTTCGGAAAGCAGC
ACATCGAAAACCTGTTTTCCGATCTGCAAGATGGCCGGCGGCTGCTGGACCTGCTGGAGGGGCTGACCGGACAGA
AGCTGCCTAAGGAGAAAGGATCTACCAGGGTCCATGCTCTGAATAACGTGAACAAGGCTCTGAGGGTGCTGCAGA
ACAATAACGTGGACCTGGTGAACATTGGTTCCACAGACATCGTGGATGGAAACCACAAACTGACACTGGGACTGA
TCTGGAACATCATTCTGCATTGGCAAGTGAAGAACGTGATGAAGAACATCATGGCCGGACTGCAGCAGACGAACT
CCGAGAAGATCCTGCTTAGCTGGGTGAGACAGAGTACCCGGAATTACCCACAGGTGAACGTGATCAATTTCACAA
CCAGCTGGTCAGACGGCCTGGCTCTGAATGCCCTGATTCATAGCCACCGGCCAGATCTGTTTGACTGGAACTCTG
TCGTGTGTCAGCAGTCAGCCACCCAGAGGCTGGAGCACGCCTTCAATATTGCCCGCTATCAGCTGGGGATTGAGA
AACTGCTGGACCCCGAGGATGTGGACACAACATACCCTGACAAGAAGAGCATACTTATGTATATCACAAGCCTGT
TCCAGGTGCTGCCACAGCAGGTCTCCATCGAGGCCATTCAAGAAGTGGAGATGCTGCCCAGGCCTCCTAAGGTCA
CCAAAGAGGAGCACTTTCAGCTCCATCATCAGATGCACTACAGCCAGCAAATTACCGTGTCCCTGGCCCAGGGCT
ACGAGAGGACAAGTTCCCCCAAGCCTAGATTTAAGAGCTATGCCTATACCCAGGCCGCCTACGTGACTACCTCCG
ATCCCACCAGGAGCCCATTTCCCAGCCAGCACCTGGAGGCTCCCGAAGATAAGAGCTTTGGCAGCAGCCTGATGG
AATCTGAGGTGAACCTGGACAGATACCAGACTGCGCTGGAGGAGGTGCTGTCCTGGCTGCTGAGCGCCGAGGACA
CCCTGCAGGCTCAGGGCGAGATTAGTAATGATGTGGAGGTGGTGAAGGATCAGTTTCACACTCACGAAGGCTACA
TGATGGACCTGACCGCCCACCAGGGCAGGGTGGGGAACATTCTGCAGCTCGGGAGTAAGCTGATAGGGACCGGCA
AACTGTCCGAGGATGAGGAAACCGAGGTGCAGGAGCAGATGAACCTGCTTAACTCCCGGTGGGAGTGTCTGAGAG
TGGCCAGCATGGAGAAGCAGAGCAATCTGCACAGAGTGCTGATGGATCTGCAGAATCAGAAGCTGAAGGAACTGA
ATGATTGGCTCACAAAGACAGAGGAGAGGACTAGAAAGATGGAGGAGGAGCCCCTGGGCCCTGACCTGGAGGACC
TGAAGCGACAGGTGCAGCAGCACAAGGTGCTGCAGGAGGATCTGGAGCAAGAACAAGTGAGGGTGAACTCTCTGA
CTCATATGGTTGTGGTGGTGGACGAGTCTTCCGGAGACCACGCAACTGCCGCCCTCGAGGAGCAGCTGAAGGTGC
TGGGCGATAGGTGGGCTAATATCTGTAGGTGGACCGAGGACAGATGGGTGCTGCTGCAGGATATCCTGCTGAAAT
GGCAGCGCCTGACAGAAGAGCAGTGTCTGTTCAGCGCATGGCTGAGCGAAAAGGAGGACGCTGTGAACAAGATCC
ACACTACAGGATTTAAAGACCAGAACGAGATGCTGAGTAGCCTGCAGAAGCTGGCTGTGCTGAAGGCTGATTTGG
AGAAAAAGAAGCAGAGCATGGGCAAGCTGTACTCCCTGAAACAGGACCTGCTGAGCACCCTGAAGAATAAGTCCG
TGACCCAGAAAACCGAAGCTTGGCTGGACAACTTCGCGCGCTGCTGGGATAACCTGGTGCAGAAGCTGGAGAAGA
GCACCGCCCAGATTTCTCAAGCAGTGACCACAACCCAGCCCAGCCTGACCCAGACTACAGTAATGGAGACAGTCA
CTACCGTGACCACCCGGGAGCAGATCCTGGTGAAGCACGCCCAGGAAGAGCTGCCGCCCCCACCACCCCAGAAAA
AGCGGACCCTGGAGCGCCTGCAGGAGCTCCAGGAGGCCACCGACGAACTGGATCTGAAGCTGAGGCAGGCCGAGG
TGATTAAGGGATCCTGGCAGCCTGTGGGAGACCTGCTGATCGACAGCCTGCAGGATCATCTGGAGAAAGTCAAAG
CTCTGAGAGGGGAGATCGCCCCACTGAAGGAGAACGTGAGCCACGTGAATGACCTGGCTAGACAGCTGACCACCT
TGGGCATTCAGCTGAGTCCTTACAATCTGTCAACTCTGGAGGATCTGAACACCCGGTGGAAACTGCTGCAGGTGG
CTGTGGAAGATCGGGTGCGCCAGTTACATGAGGCCCACAGGGACTTTGGCCCAGCCTCACAGCACTTTCTGTCAA
CCTCTGTGCAAGGACCTTGGGAGAGAGCAATCAGCCCAAACAAGGTGCCATATTATATCAATCATGAGACTCAGA
CAACTTGCTGGGATCACCCCAAGATGACAGAACTCTATCAGTCACTCGCCGATCTCAATAATGTACGGTTCTCTG
CCTACCGGACAGCTATGAAGCTGCGGAGGCTGCAGAAGGCACTCTGTCTGGACCTGCTGAGTCTCTCTGCGGCCT
GCGATGCCCTGGATCAACATAACCTGAAGCAGAATGATCAGCCTATGGACATCCTGCAGATCATTAACTGTCTCA
CCACAATCTACGATCGGCTGGAACAGGAACATAACAACCTGGTGAATGTGCCACTGTGTGTGGACATGTGCCTGA
ATTGGCTGCTCAACGTCTACGATACAGGCAGGACTGGCAGGATCCGCGTGCTGAGCTTTAAAACCGGCATCATCT
CTCTGTGCAAAGCCCACCTGGAGGACAAATATCGGTACCTGTTTAAGCAGGTGGCCTCCAGCACAGGCTTCTGTG
ATCAGCGCCGGCTGGGCCTGCTGCTGCACGACAGCATTCAGATCCCTAGGCAGCTGGGCGAGGTGGCCTCCTTCG
GCGGCTCAAACATTGAACCCAGCGTGAGATCTTGCTTTCAGTTTGCAAATAATAAACCCGAGATCGAGGCCGCCC
TGTTCCTGGATTGGATGAGACTGGAGCCTCAGAGTATGGTGTGGCTGCCAGTGCTGCATAGAGTGGCCGCCGCTG
AGACGGCCAAGCACCAGGCAAAGTGCAATATCTGCAAGGAATGCCCCATTATTGGCTTTCGATACCGGTCCTTGA
AACACTTCAATTATGACATCTGCCAGTCATGCTTCTTCAGCGGACGCGTGGCCAAGGGACACAAGATGCATTATC
CTATGGTGGAATACTGCACTCCAACTACTTCCGGCGAGGACGTGAGAGATTTCGCTAAAGTTCTTAAAAACAAAT
TTCGGACTAAGAGGTACTTCGCCAAGCACCCCCGCATGGGCTATCTGCCTGTGCAGACAGTGCTTGAAGGAGACA
ACATGGAAACCGATACAATGTGATAGATTCCAACAAAATCACTGATGCTGGAAGATCAGCAACAAAATCACTGAT
GCTGGAAGACGCAGGAATAAAATATCTTTATTTTCATTACATCTGTGTGTTGGTTTTTTGTGTGAGGAACCCCTA
GTGATGGAGTTGGCCACTCCCTCTCTGCGCGCTCGCTCGCTCACTGAGGCCGGGCGACCAAAGGTCGCCCGACGC
CCGGGCTTTGCCCGGGCGGCCTCAGTGAGCGAGCGAGCGCGC

| Nucleic acid | |
|---|---|
| cargo 12 | |
| annotated | Sequence |
| AAV2 ITR | GCGCGCTCGCTCGCTCACTGAGGCCGCCCGGGCAAAGCCCGGGCGTCGGGCGACCTT |
| | TGGTCGCCCGGCCTCAGTGAGCGAGCGAGCGCGCAGAGAGGGAGTGGCCAACTCCAT |
| | CACTAGGGGTTCCT (SEQ ID NO: 2408) |
| Novel | CGTCTGTCTAATTCCAGCCAAGGGCATGGGGGAAAGGACAGAGCCCAGGGACCTGTG |
| promoter | GCCTATTCTCTGAGAGGACGCTGGGCTAATAATAGGAGGGGAGATTAGGGAGGGATT |
| | TGACTGCATTGTTATCTCACAGGAATGGCGTTTGAGAGCCTTGCTTCCAAGCTCTTC |
| | CAAGAGTCATGCCACCCCCCTCCAATCTCTGTGGAAGTGCCCACTGCCTTTCCCGCT |
| | TCGTTCTCTTCTCTCGGTCCCATCCCTGACCCACTAGCCTGGTGCCGGGGGGAGACC |
| | AATTTCTGGAGGAAGCTCTGGGTACCCAGTCTTGCCCTAAGCCTGCCTCTGAACAGG |
| | CTGTTCTTGTTTATGACCCCCGTCCCAGCAGAATAGTGATTGCTCATCCCTGCATGT |
| | GATTTGAGAGGGCCAGTCTTTCAGGCCTGGAGGAAACTCAAGCCCCACCAGCCGCTT |
| | GGCATCGGAATGCTCAGCTGGTCCCCTCCTGGGGCTCATGTGACCAAGATCTAGCTA |
| | TAAATATCAGAGGGGCCTCAGACCAAGACAGAATTCGGGCACCAGGAGAAGGAAGCC |
| | AACAGGATCCGACCCGGTGTTTTGTGACAAAGGCAAGACCCCCAGGTCTACTTAGAG |
| | CAACGTTAGTAGAGGA (SEQ ID NO: 2404) |
| Intron | GTAAGTATCAAGGTTACAAGACAGGTTTAAGGAGACCAATAGAAACTGGGCTTGTCG |
| | AGACAGAGAAGACTCTTGCGTTTCTGATAGGCACCTATTGGTCTTACTGACATCCAC |
| | TTTGCCTTTCTCTCCACAG (SEQ ID NO: 2409) |
| Codon | ATGCTGTGGTGGGAAGAGGTCGAGGACTGCTACGAGCGCGAAGATGTGCAGAAGAAA |
| optimized | ACTTTCACTAAATGGGTGAATGCCCAGTTCTCTAAGTTCGGAAAGCAGCACATCGAA |
| microdystroph | AACCTGTTTTCCGATCTGCAAGATGGCCGGCGGCTGCTGGACCTGCTGGAGGGGCTG |
| in coding | ACCGGACAGAAGCTGCCTAAGGAGAAAGGATCTACCAGGGTCCATGCTCTGAATAAC |
| sequence | GTGAACAAGGCTCTGAGGGTGCTGCAGAACAATAACGTGGACCTGGTGAACATTGGT |
| | TCCACAGACATCGTGGATGGAAACCACAAACTGACACTGGGACTGATCTGGAACATC |
| | ATTCTGCATTGGCAAGTGAAGAACGTGATGAAGAACATCATGGCCGGACTGCAGCAG |
| | ACGAACTCCGAGAAGATCCTGCTTAGCTGGGTGAGACAGAGTACCCGGAATTACCCA |
| | CAGGTGAACGTGATCAATTTCACAACCAGCTGGTCAGACGGCCTGGCTCTGAATGCC |
| | CTGATTCATAGCCACCGGCCAGATCTGTTTGACTGGAACTCTGTCGTGTGTCAGCAG |
| | TCAGCCACCCAGAGGCTGGAGCACGCCTTCAATATTGCCCGCTATCAGCTGGGGATT |
| | GAGAAACTGCTGGACCCCGAGGATGTGGACACAACATACCCTGACAAGAAGAGCATA |
| | CTTATGTATATCACAAGCCTGTTCCAGGTGCTGCCACAGCAGGTCTCCATCGAGGCC |
| | ATTCAAGAAGTGGAGATGCTGCCCAGGCCTCCTAAGGTCACCAAAGAGGAGCACTTT |
| | CAGCTCCATCATCAGATGCACTACAGCCAGCAAATTACCGTGTCCCTGGCCCAGGGC |
| | TACGAGAGGACAAGTTCCCCCAAGCCTAGATTTAAGAGCTATGCCTATACCCAGGCC |
| | GCCTACGTGACTACCTCCGATCCCACCAGGAGCCCATTTCCCAGCCAGCACCTGGAG |
| | GCTCCCGAAGATAAGAGCTTTGGCAGCAGCCTGATGGAATCTGAGGTGAACCTGGAC |
| | AGATACCAGACTGCGCTGGAGGAGGTGCTGTCCTGGCTGCTGAGCGCCGAGGACACC |
| | CTGCAGGCTCAGGGCGAGATTAGTAATGATGTGGAGGTGGTGAAGGATCAGTTTCAC |
| | ACTCACGAAGGCTACATGATGGACCTGACCGCCCACCAGGGCAGGGTGGGGAACATT |
| | CTGCAGCTCGGGAGTAAGCTGATAGGGACCGGCAAACTGTCCGAGGATGAGGAAACC |
| | GAGGTGCAGGAGCAGATGAACCTGCTTAACTCCCGGTGGGAGTGTCTGAGAGTGGCC |
| | AGCATGGAGAAGCAGAGCAATCTGCACAGAGTGCTGATGGATCTGCAGAATCAGAAG |
| | CTGAAGGAACTGAATGATTGGCTCACAAAGACAGAGGAGAGGACTAGAAAGATGGAG |
| | GAGGAGCCCCTGGGCCCTGACCTGGAGGACCTGAAGCGACAGGTGCAGCAGCACAAG |
| | GTGCTGCAGGAGGATCTGGAGCAAGAACAAGTGAGGGTGAACTCTCTGACTCATATG |
| | GTTGTGGTGGTGGACGAGTCTTCCGGAGACCACGCAACTGCCGCCCTCGAGGAGCAG |
| | CTGAAGGTGCTGGGCGATAGGTGGGCTAATATCTGTAGGTGGACCGAGGACAGATGG |
| | GTGCTGCTGCAGGATATCCTGCTGAAATGGCAGCGCCTGACAGAAGAGCAGTGTCTG |
| | TTCAGCGCATGGCTGAGCGAAAAGGAGGACGCTGTGAACAAGATCCACACTACAGGA |
| | TTTAAAGACCAGAACGAGATGCTGAGTAGCCTGCAGAAGCTGGCTGTGCTGAAGGCT |
| | GATTTGGAGAAAAAGAAGCAGAGCATGGGCAAGCTGTACTCCCTGAAACAGGACCTG |
| | CTGAGCACCCTGAAGAATAAGTCCGTGACCCAGAAAACCGAAGCTTGGCTGGACAAC |
| | TTCGCGCGCTGCTGGGATAACCTGGTGCAGAAGCTGGAGAAGAGCACCGCCCAGATT |
| | TCTCAAGCAGTGACCACAACCCAGCCCAGCCTGACCCAGACTACAGTAATGGAGACA |
| | GTCACTACCGTGACCACCCGGGAGCAGATCCTGGTGAAGCACGCCCAGGAAGAGCTG |
| | CCGCCCCCACCACCCCAGAAAAAGCGGACCCTGGAGCGCCTGCAGGAGCTCCAGGAG |
| | GCCACCGACGAACTGGATCTGAAGCTGAGGCAGGCCGAGGTGATTAAGGGATCCTGG |
| | CAGCCTGTGGGAGACCTGCTGATCGACAGCCTGCAGGATCATCTGGAGAAAGTCAAA |
| | GCTCTGAGAGGGGAGATCGCCCCACTGAAGGAGAACGTGAGCCACGTGAATGACCTG |
| | GCTAGACAGCTGACCACCTTGGGCATTCAGCTGAGTCCTTACAATCTGTCAACTCTG |
| | GAGGATCTGAACACCCGGTGGAAACTGCTGCAGGTGGCTGTGGAAGATCGGGTGCGC |
| | CAGTTACATGAGGCCCACAGGGACTTTGGCCCAGCCTCACAGCACTTTCTGTCAACC |
| | TCTGTGCAAGGACCTTGGGAGAGAGCAATCAGCCCAAACAAGGTGCCATATTATATC |
| | AATCATGAGACTCAGACAACTTGCTGGGATCACCCCAAGATGACAGAACTCTATCAG |
| | TCACTCGCCGATCTCAATAATGTACGGTTCTCTGCCTACCGGACAGCTATGAAGCTG |
| | CGGAGGCTGCAGAAGGCACTCTGTCTGGACCTGCTGAGTCTCTCTGCGGCCTGCGAT |
| | GCCCTGGATCAACATAACCTGAAGCAGAATGATCAGCCTATGGACATCCTGCAGATC |
| | ATTAACTGTCTCACCACAATCTACGATCGGCTGGAACAGGAACATAACAACCTGGTG |
| | AATGTGCCACTGTGTGTGGACATGTGCCTGAATTGGCTGCTCAACGTCTACGATACA |
| | GGCAGGACTGGCAGGATCCGCGTGCTGAGCTTTAAAACCGGCATCATCTCTCTGTGC |
| | AAAGCCCACCTGGAGGACAAATATCGGTACCTGTTTAAGCAGGTGGCCTCCAGCACA |
| | GGCTTCTGTGATCAGCGCCGGCTGGGCCTGCTGCTGCACGACAGCATTCAGATCCCT |
| | AGGCAGCTGGGCGAGGTGGCCTCCTTCGGCGGCTCAAACATTGAACCCAGCGTGAGA |
| | TCTTGCTTTCAGTTTGCAAATAATAAACCCGAGATCGAGGCCGCCCTGTTCCTGGAT |
| | TGGATGAGACTGGAGCCTCAGAGTATGGTGTGGCTGCCAGTGCTGCATAGAGTGGCC |
| | GCCGCTGAGACGGCCAAGCACCAGGCAAAGTGCAATATCTGCAAGGAATGCCCCATT |
| | ATTGGCTTTCGATACCGGTCCTTGAAACACTTCAATTATGACATCTGCCAGTCATGC |
| | TTCTTCAGCGGACGCGTGGCCAAGGGACACAAGATGCATTATCCTATGGTGGAATAC |
| | TGCACTCCAACTACTTCCGGCGAGGACGTGAGAGATTTCGCTAAAGTTCTTAAAAAC |
| | AAATTTCGGACTAAGAGGTACTTCGCCAAGCACCCCCGCATGGGCTATCTGCCTGTG |
| | CAGACAGTGCTTGAAGGAGACAACATGGAAACCGATACAATGTGA (SEQ ID NO: |
| | 2406) |
| First DRG de- | CAACAAAATCACTGATGCTGGA (SEQ ID NO: 2399) |
| targeting | |
| miRNA binding | |
| site | |
| Second DRG | CAACAAAATCACTGATGCTGGA (SEQ ID NO: 2399) |
| de-targeting | |
| miRNA binding | |
| site | |
| Short polyA | AGGAATAAAATATCTTTATTTTCATTACATCTGTGTGTTGGTTTTTTGTGTG (SEQ |
| | ID NO: 2410) |
| AAV2 ITR | AGGAACCCCTAGTGATGGAGTTGGCCACTCCCTCTCTGCGCGCTCGCTCGCTCACTG |
| | AGGCCGGGCGACCAAAGGTCGCCCGACGCCCGGGCTTTGCCCGGGCGGCCTCAGTGA |
| | GCGAGCGAGCGCGC (SEQ ID NO: 2411) |

Nucleic acid 13
(SEQ ID NO: 2424)
GCGCGCTCGCTCGCTCACTGAGGCCGCCCGGGCAAAGCCCGGGCGTCGGGCGACCTTTGGTCGCCCGGCCTCAGT
GAGCGAGCGAGCGCGCAGAGAGGGAGTGGCCAACTCCATCACTAGGGGTTCCTTAGTTATTAATAGTAATCAATT
ACGGGGTCATTAGTTCATAGCCCATATATGGAGTTCCGCGTTACATAACTTACGGTAAATGGCCCGCCTGGCTGA
CCGCCCAACGACCCCCGCCCATTGACGTCAATAATGACGTATGTTCCCATAGTAACGCCAATAGGGACTTTCCAT
TGACGTCAATGGGTGGAGTATTTACGGTAAACTGCCCACTTGGCAGTACATCAAGTGTATCATATGCCAAGTACG
CCCCCTATTGACGTCAATGACGGTAAATGGCCCGCCTGGCATTATGCCCAGTACATGACCTTATGGGACTTTCCT
ACTTGGCAGTACATCTACGTATTAGTCATCGCTATTACCATGCTAGACTAGCATGCTGCCCATGTAAGGAGGCAA
GGCCTGGGGACACCCGAGATGCCTGGTTATAATTAACCCAGACATGTGGCTGCCCCCCCCCCCCAACACCTGCTG
CCTCTAAAAATAACCCTGCATGCCATGTTCCCGGCGAAGGGCCAGCTGTCCCCCGCCAGCTAGACTCAGCTCTCA
GGGGCCCCTCCCTGGGGACAGCCCCTCCTGGCTAGTCACACCCTGTAGGCTCCTCTATATAACCCAGGGGCACAG
GGGCTGCCCTCATTCTACCACCACCTCCACAGCACAGACAGACACTCAGGAGCCAGCCAGCCAGCCCAGGTACCT
GGGCAGGTAAGTATCAAGGTTACAAGACAGGTTTAAGGAGACCAATAGAAACTGGGCTTGTCGAGACAGAGAAGA
CTCTTGCGTTTCTGATAGGCACCTATTGGTCTTACTGACATCCACTTTGCCTTTCTCTCCACAGGTGTCCAGACT
AGTGCCACCATGCTGTGGTGGGAAGAGGTCGAGGACTGCTACGAGCGCGAAGATGTGCAGAAGAAAACTTTCACT
AAATGGGTGAATGCCCAGTTCTCTAAGTTCGGAAAGCAGCACATCGAAAACCTGTTTTCCGATCTGCAAGATGGC
CGGCGGCTGCTGGACCTGCTGGAGGGGCTGACCGGACAGAAGCTGCCTAAGGAGAAAGGATCTACCAGGGTCCAT
GCTCTGAATAACGTGAACAAGGCTCTGAGGGTGCTGCAGAACAATAACGTGGACCTGGTGAACATTGGTTCCACA
GACATCGTGGATGGAAACCACAAACTGACACTGGGACTGATCTGGAACATCATTCTGCATTGGCAAGTGAAGAAC
GTGATGAAGAACATCATGGCCGGACTGCAGCAGACGAACTCCGAGAAGATCCTGCTTAGCTGGGTGAGACAGAGT
ACCCGGAATTACCCACAGGTGAACGTGATCAATTTCACAACCAGCTGGTCAGACGGCCTGGCTCTGAATGCCCTG
ATTCATAGCCACCGGCCAGATCTGTTTGACTGGAACTCTGTCGTGTGTCAGCAGTCAGCCACCCAGAGGCTGGAG
CACGCCTTCAATATTGCCCGCTATCAGCTGGGGATTGAGAAACTGCTGGACCCCGAGGATGTGGACACAACATAC
CCTGACAAGAAGAGCATACTTATGTATATCACAAGCCTGTTCCAGGTGCTGCCACAGCAGGTCTCCATCGAGGCC
ATTCAAGAAGTGGAGATGCTGCCCAGGCCTCCTAAGGTCACCAAAGAGGAGCACTTTCAGCTCCATCATCAGATG
CACTACAGCCAGCAAATTACCGTGTCCCTGGCCCAGGGCTACGAGAGGACAAGTTCCCCCAAGCCTAGATTTAAG
AGCTATGCCTATACCCAGGCCGCCTACGTGACTACCTCCGATCCCACCAGGAGCCCATTTCCCAGCCAGCACCTG
GAGGCTCCCGAAGATAAGAGCTTTGGCAGCAGCCTGATGGAATCTGAGGTGAACCTGGACAGATACCAGACTGCG
CTGGAGGAGGTGCTGTCCTGGCTGCTGAGCGCCGAGGACACCCTGCAGGCTCAGGGCGAGATTAGTAATGATGTG
GAGGTGGTGAAGGATCAGTTTCACACTCACGAAGGCTACATGATGGACCTGACCGCCCACCAGGGCAGGGTGGGG
AACATTCTGCAGCTCGGGAGTAAGCTGATAGGGACCGGCAAACTGTCCGAGGATGAGGAAACCGAGGTGCAGGAG
CAGATGAACCTGCTTAACTCCCGGTGGGAGTGTCTGAGAGTGGCCAGCATGGAGAAGCAGAGCAATCTGCACAGA
GTGCTGATGGATCTGCAGAATCAGAAGCTGAAGGAACTGAATGATTGGCTCACAAAGACAGAGGAGAGGACTAGA
AAGATGGAGGAGGAGCCCCTGGGCCCTGACCTGGAGGACCTGAAGCGACAGGTGCAGCAGCACAAGGTGCTGCAG
GAGGATCTGGAGCAAGAACAAGTGAGGGTGAACTCTCTGACTCATATGGTTGTGGTGGTGGACGAGTCTTCCGGA
GACCACGCAACTGCCGCCCTCGAGGAGCAGCTGAAGGTGCTGGGCGATAGGTGGGCTAATATCTGTAGGTGGACC
GAGGACAGATGGGTGCTGCTGCAGGATATCCTGCTGAAATGGCAGCGCCTGACAGAAGAGCAGTGTCTGTTCAGC
GCATGGCTGAGCGAAAAGGAGGACGCTGTGAACAAGATCCACACTACAGGATTTAAAGACCAGAACGAGATGCTG
AGTAGCCTGCAGAAGCTGGCTGTGCTGAAGGCTGATTTGGAGAAAAAGAAGCAGAGCATGGGCAAGCTGTACTCC
CTGAAACAGGACCTGCTGAGCACCCTGAAGAATAAGTCCGTGACCCAGAAAACCGAAGCTTGGCTGGACAACTTC
GCGCGCTGCTGGGATAACCTGGTGCAGAAGCTGGAGAAGAGCACCGCCCAGATTTCTCAAGCAGTGACCACAACC
CAGCCCAGCCTGACCCAGACTACAGTAATGGAGACAGTCACTACCGTGACCACCCGGGAGCAGATCCTGGTGAAG
CACGCCCAGGAAGAGCTGCCGCCCCCACCACCCCAGAAAAAGCGGACCCTGGAGCGCCTGCAGGAGCTCCAGGAG
GCCACCGACGAACTGGATCTGAAGCTGAGGCAGGCCGAGGTGATTAAGGGATCCTGGCAGCCTGTGGGAGACCTG
CTGATCGACAGCCTGCAGGATCATCTGGAGAAAGTCAAAGCTCTGAGAGGGGAGATCGCCCCACTGAAGGAGAAC
GTGAGCCACGTGAATGACCTGGCTAGACAGCTGACCACCTTGGGCATTCAGCTGAGTCCTTACAATCTGTCAACT
CTGGAGGATCTGAACACCCGGTGGAAACTGCTGCAGGTGGCTGTGGAAGATCGGGTGCGCCAGTTACATGAGGCC
CACAGGGACTTTGGCCCAGCCTCACAGCACTTTCTGTCAACCTCTGTGCAAGGACCTTGGGAGAGAGCAATCAGC
CCAAACAAGGTGCCATATTATATCAATCATGAGACTCAGACAACTTGCTGGGATCACCCCAAGATGACAGAACTC
TATCAGTCACTCGCCGATCTCAATAATGTACGGTTCTCTGCCTACCGGACAGCTATGAAGCTGCGGAGGCTGCAG
AAGGCACTCTGTCTGGACCTGCTGAGTCTCTCTGCGGCCTGCGATGCCCTGGATCAACATAACCTGAAGCAGAAT
GATCAGCCTATGGACATCCTGCAGATCATTAACTGTCTCACCACAATCTACGATCGGCTGGAACAGGAACATAAC
AACCTGGTGAATGTGCCACTGTGTGTGGACATGTGCCTGAATTGGCTGCTCAACGTCTACGATACAGGCAGGACT
GGCAGGATCCGCGTGCTGAGCTTTAAAACCGGCATCATCTCTCTGTGCAAAGCCCACCTGGAGGACAAATATCGG
TACCTGTTTAAGCAGGTGGCCTCCAGCACAGGCTTCTGTGATCAGCGCCGGCTGGGCCTGCTGCTGCACGACAGC
ATTCAGATCCCTAGGCAGCTGGGCGAGGTGGCCTCCTTCGGCGGCTCAAACATTGAACCCAGCGTGAGATCTTGC
TTTCAGTTTGCAAATAATAAACCCGAGATCGAGGCCGCCCTGTTCCTGGATTGGATGAGACTGGAGCCTCAGAGT
ATGGTGTGGCTGCCAGTGCTGCATAGAGTGGCCGCCGCTGAGACGGCCAAGCACCAGGCAAAGTGCAATATCTGC
AAGGAATGCCCCATTATTGGCTTTCGATACCGGTCCTTGAAACACTTCAATTATGACATCTGCCAGTCATGCTTC
TTCAGCGGACGCGTGGCCAAGGGACACAAGATGCATTATCCTATGGTGGAATACTGCACTCCAACTACTTCCGGC
GAGGACGTGAGAGATTTCGCTAAAGTTCTTAAAAACAAATTTCGGACTAAGAGGTACTTCGCCAAGCACCCCCGC
ATGGGCTATCTGCCTGTGCAGACAGTGCTTGAAGGAGACAACATGGAAACCGATACAATGTGATAGATTCCGGCC
TGATTCACAACACCAGCTAGATCAGCGGCCTGATTCACAACACCAGCTAGACGCAGGAATAAAATATCTTTATTT
TCATTACATCTGTGTGTTGGTTTTTTGTGTGAGGAACCCCTAGTGATGGAGTTGGCCACTCCCTCTCTGCGCGCT
CGCTCGCTCACTGAGGCCGGGCGACCAAAGGTCGCCCGACGCCCGGGCTTTGCCCGGGCGGCCTCAGTGAGCGAG
CGAGCGCGC

| Nucleic acid | |
|---|---|
| cargo 13 | |
| annotated | Sequence |
| AAV2 ITR | GCGCGCTCGCTCGCTCACTGAGGCCGCCCGGGCAAAGCCCGGGCGTCGGGCGACCTTT |
| | GGTCGCCCGGCCTCAGTGAGCGAGCGAGCGCGCAGAGAGGGAGTGGCCAACTCCATCA |
| | CTAGGGGTTCCT (SEQ ID NO: 2408) |
| Novel | TAGTTATTAATAGTAATCAATTACGGGGTCATTAGTTCATAGCCCATATATGGAGTTC |
| promoter | CGCGTTACATAACTTACGGTAAATGGCCCGCCTGGCTGACCGCCCAACGACCCCCGCC |
| | CATTGACGTCAATAATGACGTATGTTCCCATAGTAACGCCAATAGGGACTTTCCATTG |
| | ACGTCAATGGGTGGAGTATTTACGGTAAACTGCCCACTTGGCAGTACATCAAGTGTAT |
| | CATATGCCAAGTACGCCCCCTATTGACGTCAATGACGGTAAATGGCCCGCCTGGCATT |
| | ATGCCCAGTACATGACCTTATGGGACTTTCCTACTTGGCAGTACATCTACGTATTAGT |
| | CATCGCTATTACCATGCTAGACTAGCATGCTGCCCATGTAAGGAGGCAAGGCCTGGGG |
| | ACACCCGAGATGCCTGGTTATAATTAACCCAGACATGTGGCTGCCCCCCCCCCCCAAC |
| | ACCTGCTGCCTCTAAAAATAACCCTGCATGCCATGTTCCCGGCGAAGGGCCAGCTGTC |
| | CCCCGCCAGCTAGACTCAGCTCTCAGGGGCCCCTCCCTGGGGACAGCCCCTCCTGGCT |
| | AGTCACACCCTGTAGGCTCCTCTATATAACCCAGGGGCACAGGGGCTGCCCTCATTCT |
| | ACCACCACCTCCACAGCACAGACAGACACTCAGGAGCCAGCCAGC (SEQ ID NO: |
| | 2402) |
| Intron | GTAAGTATCAAGGTTACAAGACAGGTTTAAGGAGACCAATAGAAACTGGGCTTGTCGA |
| | GACAGAGAAGACTCTTGCGTTTCTGATAGGCACCTATTGGTCTTACTGACATCCACTT |
| | TGCCTTTCTCTCCACAG (SEQ ID NO: 2409) |
| Codon | ATGCTGTGGTGGGAAGAGGTCGAGGACTGCTACGAGCGCGAAGATGTGCAGAAGAAAA |
| optimized | CTTTCACTAAATGGGTGAATGCCCAGTTCTCTAAGTTCGGAAAGCAGCACATCGAAAA |
| microdystrophin | CCTGTTTTCCGATCTGCAAGATGGCCGGCGGCTGCTGGACCTGCTGGAGGGGCTGACC |
| coding | GGACAGAAGCTGCCTAAGGAGAAAGGATCTACCAGGGTCCATGCTCTGAATAACGTGA |
| sequence | ACAAGGCTCTGAGGGTGCTGCAGAACAATAACGTGGACCTGGTGAACATTGGTTCCAC |
| | AGACATCGTGGATGGAAACCACAAACTGACACTGGGACTGATCTGGAACATCATTCTG |
| | CATTGGCAAGTGAAGAACGTGATGAAGAACATCATGGCCGGACTGCAGCAGACGAACT |
| | CCGAGAAGATCCTGCTTAGCTGGGTGAGACAGAGTACCCGGAATTACCCACAGGTGAA |
| | CGTGATCAATTTCACAACCAGCTGGTCAGACGGCCTGGCTCTGAATGCCCTGATTCAT |
| | AGCCACCGGCCAGATCTGTTTGACTGGAACTCTGTCGTGTGTCAGCAGTCAGCCACCC |
| | AGAGGCTGGAGCACGCCTTCAATATTGCCCGCTATCAGCTGGGGATTGAGAAACTGCT |
| | GGACCCCGAGGATGTGGACACAACATACCCTGACAAGAAGAGCATACTTATGTATATC |
| | ACAAGCCTGTTCCAGGTGCTGCCACAGCAGGTCTCCATCGAGGCCATTCAAGAAGTGG |
| | AGATGCTGCCCAGGCCTCCTAAGGTCACCAAAGAGGAGCACTTTCAGCTCCATCATCA |
| | GATGCACTACAGCCAGCAAATTACCGTGTCCCTGGCCCAGGGCTACGAGAGGACAAGT |
| | TCCCCCAAGCCTAGATTTAAGAGCTATGCCTATACCCAGGCCGCCTACGTGACTACCT |
| | CCGATCCCACCAGGAGCCCATTTCCCAGCCAGCACCTGGAGGCTCCCGAAGATAAGAG |
| | CTTTGGCAGCAGCCTGATGGAATCTGAGGTGAACCTGGACAGATACCAGACTGCGCTG |
| | GAGGAGGTGCTGTCCTGGCTGCTGAGCGCCGAGGACACCCTGCAGGCTCAGGGCGAGA |
| | TTAGTAATGATGTGGAGGTGGTGAAGGATCAGTTTCACACTCACGAAGGCTACATGAT |
| | GGACCTGACCGCCCACCAGGGCAGGGTGGGGAACATTCTGCAGCTCGGGAGTAAGCTG |
| | ATAGGGACCGGCAAACTGTCCGAGGATGAGGAAACCGAGGTGCAGGAGCAGATGAACC |
| | TGCTTAACTCCCGGTGGGAGTGTCTGAGAGTGGCCAGCATGGAGAAGCAGAGCAATCT |
| | GCACAGAGTGCTGATGGATCTGCAGAATCAGAAGCTGAAGGAACTGAATGATTGGCTC |
| | ACAAAGACAGAGGAGAGGACTAGAAAGATGGAGGAGGAGCCCCTGGGCCCTGACCTGG |
| | AGGACCTGAAGCGACAGGTGCAGCAGCACAAGGTGCTGCAGGAGGATCTGGAGCAAGA |
| | ACAAGTGAGGGTGAACTCTCTGACTCATATGGTTGTGGTGGTGGACGAGTCTTCCGGA |
| | GACCACGCAACTGCCGCCCTCGAGGAGCAGCTGAAGGTGCTGGGCGATAGGTGGGCTA |
| | ATATCTGTAGGTGGACCGAGGACAGATGGGTGCTGCTGCAGGATATCCTGCTGAAATG |
| | GCAGCGCCTGACAGAAGAGCAGTGTCTGTTCAGCGCATGGCTGAGCGAAAAGGAGGAC |
| | GCTGTGAACAAGATCCACACTACAGGATTTAAAGACCAGAACGAGATGCTGAGTAGCC |
| | TGCAGAAGCTGGCTGTGCTGAAGGCTGATTTGGAGAAAAAGAAGCAGAGCATGGGCAA |
| | GCTGTACTCCCTGAAACAGGACCTGCTGAGCACCCTGAAGAATAAGTCCGTGACCCAG |
| | AAAACCGAAGCTTGGCTGGACAACTTCGCGCGCTGCTGGGATAACCTGGTGCAGAAGC |
| | TGGAGAAGAGCACCGCCCAGATTTCTCAAGCAGTGACCACAACCCAGCCCAGCCTGAC |
| | CCAGACTACAGTAATGGAGACAGTCACTACCGTGACCACCCGGGAGCAGATCCTGGTG |
| | AAGCACGCCCAGGAAGAGCTGCCGCCCCCACCACCCCAGAAAAAGCGGACCCTGGAGC |
| | GCCTGCAGGAGCTCCAGGAGGCCACCGACGAACTGGATCTGAAGCTGAGGCAGGCCGA |
| | GGTGATTAAGGGATCCTGGCAGCCTGTGGGAGACCTGCTGATCGACAGCCTGCAGGAT |
| | CATCTGGAGAAAGTCAAAGCTCTGAGAGGGGAGATCGCCCCACTGAAGGAGAACGTGA |
| | GCCACGTGAATGACCTGGCTAGACAGCTGACCACCTTGGGCATTCAGCTGAGTCCTTA |
| | CAATCTGTCAACTCTGGAGGATCTGAACACCCGGTGGAAACTGCTGCAGGTGGCTGTG |
| | GAAGATCGGGTGCGCCAGTTACATGAGGCCCACAGGGACTTTGGCCCAGCCTCACAGC |
| | ACTTTCTGTCAACCTCTGTGCAAGGACCTTGGGAGAGAGCAATCAGCCCAAACAAGGT |
| | GCCATATTATATCAATCATGAGACTCAGACAACTTGCTGGGATCACCCCAAGATGACA |
| | GAACTCTATCAGTCACTCGCCGATCTCAATAATGTACGGTTCTCTGCCTACCGGACAG |
| | CTATGAAGCTGCGGAGGCTGCAGAAGGCACTCTGTCTGGACCTGCTGAGTCTCTCTGC |
| | GGCCTGCGATGCCCTGGATCAACATAACCTGAAGCAGAATGATCAGCCTATGGACATC |
| | CTGCAGATCATTAACTGTCTCACCACAATCTACGATCGGCTGGAACAGGAACATAACA |
| | ACCTGGTGAATGTGCCACTGTGTGTGGACATGTGCCTGAATTGGCTGCTCAACGTCTA |
| | CGATACAGGCAGGACTGGCAGGATCCGCGTGCTGAGCTTTAAAACCGGCATCATCTCT |
| | CTGTGCAAAGCCCACCTGGAGGACAAATATCGGTACCTGTTTAAGCAGGTGGCCTCCA |
| | GCACAGGCTTCTGTGATCAGCGCCGGCTGGGCCTGCTGCTGCACGACAGCATTCAGAT |
| | CCCTAGGCAGCTGGGCGAGGTGGCCTCCTTCGGCGGCTCAAACATTGAACCCAGCGTG |
| | AGATCTTGCTTTCAGTTTGCAAATAATAAACCCGAGATCGAGGCCGCCCTGTTCCTGG |
| | ATTGGATGAGACTGGAGCCTCAGAGTATGGTGTGGCTGCCAGTGCTGCATAGAGTGGC |
| | CGCCGCTGAGACGGCCAAGCACCAGGCAAAGTGCAATATCTGCAAGGAATGCCCCATT |
| | ATTGGCTTTCGATACCGGTCCTTGAAACACTTCAATTATGACATCTGCCAGTCATGCT |
| | TCTTCAGCGGACGCGTGGCCAAGGGACACAAGATGCATTATCCTATGGTGGAATACTG |
| | CACTCCAACTACTTCCGGCGAGGACGTGAGAGATTTCGCTAAAGTTCTTAAAAACAAA |
| | TTTCGGACTAAGAGGTACTTCGCCAAGCACCCCCGCATGGGCTATCTGCCTGTGCAGA |
| | CAGTGCTTGAAGGAGACAACATGGAAACCGATACAATGTGA (SEQ ID NO: |
| | 2406) |
| First DRG de- | CGGCCTGATTCACAACACCAGCT (SEQ ID NO: 2400) |
| targeting | |
| miRNA binding | |
| site | |
| Second DRG | CGGCCTGATTCACAACACCAGCT (SEQ ID NO: 2400) |
| de-targeting | |
| miRNA binding | |
| site | |
| Short polyA | AGGAATAAAATATCTTTATTTTCATTACATCTGTGTGTTGGTTTTTTGTGTG (SEQ |
| | ID NO: 2410) |
| AAV2 ITR | AGGAACCCCTAGTGATGGAGTTGGCCACTCCCTCTCTGCGCGCTCGCTCGCTCACTGA |
| | GGCCGGGCGACCAAAGGTCGCCCGACGCCCGGGCTTTGCCCGGGCGGCCTCAGTGAGC |
| | GAGCGAGCGCGC (SEQ ID NO: 2411) |

Nucleic acid 14
(SEQ ID NO: 2425)
GCGCGCTCGCTCGCTCACTGAGGCCGCCCGGGCAAAGCCCGGGCGTCGGGCGACCTTTGGTCGCCCGGCCTCAGT
GAGCGAGCGAGCGCGCAGAGAGGGAGTGGCCAACTCCATCACTAGGGGTTCCTCGTCTGTCTAATTCCAGCCAAG
GGCATGGGGGAAAGGACAGAGCCCAGGGACCTGTGGCCTATTCTCTGAGAGGACGCTGGGCTAATAATAGGAGGG
GAGATTAGGGAGGGATTTGACTGCATTGTTATCTCACAGGAATGGCGTTTGAGAGCCTTGCTTCCAAGCTCTTCC
AAGAGTCATGCCACCCCCCTCCAATCTCTGTGGAAGTGCCCACTGCCTTTCCCGCTTCGTTCTCTTCTCTCTAAA
TCTGAGCCCACCCCACTCAGGGGTACAGGATCTGGTTCATTTATCTCCCAGAATGATGCCTTGGGTTGCGTCCCC
TCTAAACTCTGGCACATTCCAGCCCCTCTTTGGGAGAAAGAACATCTCTTCTTGCCCAGGCCCTAGTGAGACATG
CATCGCAAGACATGCTCCCCCCTTCCTCCCCGCTGGGCTCCAGCTGCTGCCAGCCCTCCAAGAAAGGAGAGGCCC
TGAGTTGGGCTATTTTGGTATCTGGGGTGGGCACCCGCAGGGCTAAGGTTACCTTGGTATGTTAAGGGCTCCCTG
GGGCAGGACTATATAACCCCAGAGGGACTGCCCCATGCTGACTCCTTGCTTCTTTCCTGCTCGAGCCGCTGCCTT
GCCCCCCGGAGACTGAAGACACAGCCCAGGTACCTGGGCAGGTAAGTATCAAGGTTACAAGACAGGTTTAAGGAG
ACCAATAGAAACTGGGCTTGTCGAGACAGAGAAGACTCTTGCGTTTCTGATAGGCACCTATTGGTCTTACTGACA
TCCACTTTGCCTTTCTCTCCACAGGTGTCCAGACTAGTGCCACCATGCTGTGGTGGGAAGAGGTCGAGGACTGCT
ACGAGCGCGAAGATGTGCAGAAGAAAACTTTCACTAAATGGGTGAATGCCCAGTTCTCTAAGTTCGGAAAGCAGC
ACATCGAAAACCTGTTTTCCGATCTGCAAGATGGCCGGCGGCTGCTGGACCTGCTGGAGGGGCTGACCGGACAGA
AGCTGCCTAAGGAGAAAGGATCTACCAGGGTCCATGCTCTGAATAACGTGAACAAGGCTCTGAGGGTGCTGCAGA
ACAATAACGTGGACCTGGTGAACATTGGTTCCACAGACATCGTGGATGGAAACCACAAACTGACACTGGGACTGA
TCTGGAACATCATTCTGCATTGGCAAGTGAAGAACGTGATGAAGAACATCATGGCCGGACTGCAGCAGACGAACT
CCGAGAAGATCCTGCTTAGCTGGGTGAGACAGAGTACCCGGAATTACCCACAGGTGAACGTGATCAATTTCACAA
CCAGCTGGTCAGACGGCCTGGCTCTGAATGCCCTGATTCATAGCCACCGGCCAGATCTGTTTGACTGGAACTCTG
TCGTGTGTCAGCAGTCAGCCACCCAGAGGCTGGAGCACGCCTTCAATATTGCCCGCTATCAGCTGGGGATTGAGA
AACTGCTGGACCCCGAGGATGTGGACACAACATACCCTGACAAGAAGAGCATACTTATGTATATCACAAGCCTGT
TCCAGGTGCTGCCACAGCAGGTCTCCATCGAGGCCATTCAAGAAGTGGAGATGCTGCCCAGGCCTCCTAAGGTCA
CCAAAGAGGAGCACTTTCAGCTCCATCATCAGATGCACTACAGCCAGCAAATTACCGTGTCCCTGGCCCAGGGCT
ACGAGAGGACAAGTTCCCCCAAGCCTAGATTTAAGAGCTATGCCTATACCCAGGCCGCCTACGTGACTACCTCCG
ATCCCACCAGGAGCCCATTTCCCAGCCAGCACCTGGAGGCTCCCGAAGATAAGAGCTTTGGCAGCAGCCTGATGG
AATCTGAGGTGAACCTGGACAGATACCAGACTGCGCTGGAGGAGGTGCTGTCCTGGCTGCTGAGCGCCGAGGACA
CCCTGCAGGCTCAGGGCGAGATTAGTAATGATGTGGAGGTGGTGAAGGATCAGTTTCACACTCACGAAGGCTACA
TGATGGACCTGACCGCCCACCAGGGCAGGGTGGGGAACATTCTGCAGCTCGGGAGTAAGCTGATAGGGACCGGCA
AACTGTCCGAGGATGAGGAAACCGAGGTGCAGGAGCAGATGAACCTGCTTAACTCCCGGTGGGAGTGTCTGAGAG
TGGCCAGCATGGAGAAGCAGAGCAATCTGCACAGAGTGCTGATGGATCTGCAGAATCAGAAGCTGAAGGAACTGA
ATGATTGGCTCACAAAGACAGAGGAGAGGACTAGAAAGATGGAGGAGGAGCCCCTGGGCCCTGACCTGGAGGACC
TGAAGCGACAGGTGCAGCAGCACAAGGTGCTGCAGGAGGATCTGGAGCAAGAACAAGTGAGGGTGAACTCTCTGA
CTCATATGGTTGTGGTGGTGGACGAGTCTTCCGGAGACCACGCAACTGCCGCCCTCGAGGAGCAGCTGAAGGTGC
TGGGCGATAGGTGGGCTAATATCTGTAGGTGGACCGAGGACAGATGGGTGCTGCTGCAGGATATCCTGCTGAAAT
GGCAGCGCCTGACAGAAGAGCAGTGTCTGTTCAGCGCATGGCTGAGCGAAAAGGAGGACGCTGTGAACAAGATCC
ACACTACAGGATTTAAAGACCAGAACGAGATGCTGAGTAGCCTGCAGAAGCTGGCTGTGCTGAAGGCTGATTTGG
AGAAAAAGAAGCAGAGCATGGGCAAGCTGTACTCCCTGAAACAGGACCTGCTGAGCACCCTGAAGAATAAGTCCG
TGACCCAGAAAACCGAAGCTTGGCTGGACAACTTCGCGCGCTGCTGGGATAACCTGGTGCAGAAGCTGGAGAAGA
GCACCGCCCAGATTTCTCAAGCAGTGACCACAACCCAGCCCAGCCTGACCCAGACTACAGTAATGGAGACAGTCA
CTACCGTGACCACCCGGGAGCAGATCCTGGTGAAGCACGCCCAGGAAGAGCTGCCGCCCCCACCACCCCAGAAAA
AGCGGACCCTGGAGCGCCTGCAGGAGCTCCAGGAGGCCACCGACGAACTGGATCTGAAGCTGAGGCAGGCCGAGG
TGATTAAGGGATCCTGGCAGCCTGTGGGAGACCTGCTGATCGACAGCCTGCAGGATCATCTGGAGAAAGTCAAAG
CTCTGAGAGGGGAGATCGCCCCACTGAAGGAGAACGTGAGCCACGTGAATGACCTGGCTAGACAGCTGACCACCT
TGGGCATTCAGCTGAGTCCTTACAATCTGTCAACTCTGGAGGATCTGAACACCCGGTGGAAACTGCTGCAGGTGG
CTGTGGAAGATCGGGTGCGCCAGTTACATGAGGCCCACAGGGACTTTGGCCCAGCCTCACAGCACTTTCTGTCAA
CCTCTGTGCAAGGACCTTGGGAGAGAGCAATCAGCCCAAACAAGGTGCCATATTATATCAATCATGAGACTCAGA
CAACTTGCTGGGATCACCCCAAGATGACAGAACTCTATCAGTCACTCGCCGATCTCAATAATGTACGGTTCTCTG
CCTACCGGACAGCTATGAAGCTGCGGAGGCTGCAGAAGGCACTCTGTCTGGACCTGCTGAGTCTCTCTGCGGCCT
GCGATGCCCTGGATCAACATAACCTGAAGCAGAATGATCAGCCTATGGACATCCTGCAGATCATTAACTGTCTCA
CCACAATCTACGATCGGCTGGAACAGGAACATAACAACCTGGTGAATGTGCCACTGTGTGTGGACATGTGCCTGA
ATTGGCTGCTCAACGTCTACGATACAGGCAGGACTGGCAGGATCCGCGTGCTGAGCTTTAAAACCGGCATCATCT
CTCTGTGCAAAGCCCACCTGGAGGACAAATATCGGTACCTGTTTAAGCAGGTGGCCTCCAGCACAGGCTTCTGTG
ATCAGCGCCGGCTGGGCCTGCTGCTGCACGACAGCATTCAGATCCCTAGGCAGCTGGGCGAGGTGGCCTCCTTCG
GCGGCTCAAACATTGAACCCAGCGTGAGATCTTGCTTTCAGTTTGCAAATAATAAACCCGAGATCGAGGCCGCCC
TGTTCCTGGATTGGATGAGACTGGAGCCTCAGAGTATGGTGTGGCTGCCAGTGCTGCATAGAGTGGCCGCCGCTG
AGACGGCCAAGCACCAGGCAAAGTGCAATATCTGCAAGGAATGCCCCATTATTGGCTTTCGATACCGGTCCTTGA
AACACTTCAATTATGACATCTGCCAGTCATGCTTCTTCAGCGGACGCGTGGCCAAGGGACACAAGATGCATTATC
CTATGGTGGAATACTGCACTCCAACTACTTCCGGCGAGGACGTGAGAGATTTCGCTAAAGTTCTTAAAAACAAAT
TTCGGACTAAGAGGTACTTCGCCAAGCACCCCCGCATGGGCTATCTGCCTGTGCAGACAGTGCTTGAAGGAGACA
ACATGGAAACCGATACAATGTGATAGATTCCGGCCTGATTCACAACACCAGCTAGATCAGCGGCCTGATTCACAA
CACCAGCTAGACGCAGGAATAAAATATCTTTATTTTCATTACATCTGTGTGTTGGTTTTTTGTGTGAGGAACCCC
TAGTGATGGAGTTGGCCACTCCCTCTCTGCGCGCTCGCTCGCTCACTGAGGCCGGGCGACCAAAGGTCGCCCGAC
GCCCGGGCTTTGCCCGGGCGGCCTCAGTGAGCGAGCGAGCGCGC

| Nucleic acid | |
|---|---|
| cargo 14 | |
| annotated | Sequence |
| AAV2 ITR | GCGCGCTCGCTCGCTCACTGAGGCCGCCCGGGCAAAGCCCGGGCGTCGGGCGACC |
| | TTTGGTCGCCCGGCCTCAGTGAGCGAGCGAGCGCGCAGAGAGGGAGTGGCCAACT |
| | CCATCACTAGGGGTTCCT (SEQ ID NO: 2408) |
| Novel promoter | CGTCTGTCTAATTCCAGCCAAGGGCATGGGGGAAAGGACAGAGCCCAGGGACCTG |
| | TGGCCTATTCTCTGAGAGGACGCTGGGCTAATAATAGGAGGGGAGATTAGGGAGG |
| | GATTTGACTGCATTGTTATCTCACAGGAATGGCGTTTGAGAGCCTTGCTTCCAAG |
| | CTCTTCCAAGAGTCATGCCACCCCCCTCCAATCTCTGTGGAAGTGCCCACTGCCT |
| | TTCCCGCTTCGTTCTCTTCTCTCTAAATCTGAGCCCACCCCACTCAGGGGTACAG |
| | GATCTGGTTCATTTATCTCCCAGAATGATGCCTTGGGTTGCGTCCCCTCTAAACT |
| | CTGGCACATTCCAGCCCCTCTTTGGGAGAAAGAACATCTCTTCTTGCCCAGGCCC |
| | TAGTGAGACATGCATCGCAAGACATGCTCCCCCCTTCCTCCCCGCTGGGCTCCAG |
| | CTGCTGCCAGCCCTCCAAGAAAGGAGAGGCCCTGAGTTGGGCTATTTTGGTATCT |
| | GGGGTGGGCACCCGCAGGGCTAAGGTTACCTTGGTATGTTAAGGGCTCCCTGGGG |
| | CAGGACTATATAACCCCAGAGGGACTGCCCCATGCTGACTCCTTGCTTCTTTCCT |
| | GCTCGAGCCGCTGCCTTGCCCCCCGGAGACTGAAGACA (SEQ ID NO: |
| | 2403) |
| Intron | GTAAGTATCAAGGTTACAAGACAGGTTTAAGGAGACCAATAGAAACTGGGCTTGT |
| | CGAGACAGAGAAGACTCTTGCGTTTCTGATAGGCACCTATTGGTCTTACTGACAT |
| | CCACTTTGCCTTTCTCTCCACAG (SEQ ID NO: 2409) |
| Codon optimized | ATGCTGTGGTGGGAAGAGGTCGAGGACTGCTACGAGCGCGAAGATGTGCAGAAGA |
| microdystrophin | AAACTTTCACTAAATGGGTGAATGCCCAGTTCTCTAAGTTCGGAAAGCAGCACAT |
| coding sequence | CGAAAACCTGTTTTCCGATCTGCAAGATGGCCGGCGGCTGCTGGACCTGCTGGAG |
| | GGGCTGACCGGACAGAAGCTGCCTAAGGAGAAAGGATCTACCAGGGTCCATGCTC |
| | TGAATAACGTGAACAAGGCTCTGAGGGTGCTGCAGAACAATAACGTGGACCTGGT |
| | GAACATTGGTTCCACAGACATCGTGGATGGAAACCACAAACTGACACTGGGACTG |
| | ATCTGGAACATCATTCTGCATTGGCAAGTGAAGAACGTGATGAAGAACATCATGG |
| | CCGGACTGCAGCAGACGAACTCCGAGAAGATCCTGCTTAGCTGGGTGAGACAGAG |
| | TACCCGGAATTACCCACAGGTGAACGTGATCAATTTCACAACCAGCTGGTCAGAC |
| | GGCCTGGCTCTGAATGCCCTGATTCATAGCCACCGGCCAGATCTGTTTGACTGGA |
| | ACTCTGTCGTGTGTCAGCAGTCAGCCACCCAGAGGCTGGAGCACGCCTTCAATAT |
| | TGCCCGCTATCAGCTGGGGATTGAGAAACTGCTGGACCCCGAGGATGTGGACACA |
| | ACATACCCTGACAAGAAGAGCATACTTATGTATATCACAAGCCTGTTCCAGGTGC |
| | TGCCACAGCAGGTCTCCATCGAGGCCATTCAAGAAGTGGAGATGCTGCCCAGGCC |
| | TCCTAAGGTCACCAAAGAGGAGCACTTTCAGCTCCATCATCAGATGCACTACAGC |
| | CAGCAAATTACCGTGTCCCTGGCCCAGGGCTACGAGAGGACAAGTTCCCCCAAGC |
| | CTAGATTTAAGAGCTATGCCTATACCCAGGCCGCCTACGTGACTACCTCCGATCC |
| | CACCAGGAGCCCATTTCCCAGCCAGCACCTGGAGGCTCCCGAAGATAAGAGCTTT |
| | GGCAGCAGCCTGATGGAATCTGAGGTGAACCTGGACAGATACCAGACTGCGCTGG |
| | AGGAGGTGCTGTCCTGGCTGCTGAGCGCCGAGGACACCCTGCAGGCTCAGGGCGA |
| | GATTAGTAATGATGTGGAGGTGGTGAAGGATCAGTTTCACACTCACGAAGGCTAC |
| | ATGATGGACCTGACCGCCCACCAGGGCAGGGTGGGGAACATTCTGCAGCTCGGGA |
| | GTAAGCTGATAGGGACCGGCAAACTGTCCGAGGATGAGGAAACCGAGGTGCAGGA |
| | GCAGATGAACCTGCTTAACTCCCGGTGGGAGTGTCTGAGAGTGGCCAGCATGGAG |
| | AAGCAGAGCAATCTGCACAGAGTGCTGATGGATCTGCAGAATCAGAAGCTGAAGG |
| | AACTGAATGATTGGCTCACAAAGACAGAGGAGAGGACTAGAAAGATGGAGGAGGA |
| | GCCCCTGGGCCCTGACCTGGAGGACCTGAAGCGACAGGTGCAGCAGCACAAGGTG |
| | CTGCAGGAGGATCTGGAGCAAGAACAAGTGAGGGTGAACTCTCTGACTCATATGG |
| | TTGTGGTGGTGGACGAGTCTTCCGGAGACCACGCAACTGCCGCCCTCGAGGAGCA |
| | GCTGAAGGTGCTGGGCGATAGGTGGGCTAATATCTGTAGGTGGACCGAGGACAGA |
| | TGGGTGCTGCTGCAGGATATCCTGCTGAAATGGCAGCGCCTGACAGAAGAGCAGT |
| | GTCTGTTCAGCGCATGGCTGAGCGAAAAGGAGGACGCTGTGAACAAGATCCACAC |
| | TACAGGATTTAAAGACCAGAACGAGATGCTGAGTAGCCTGCAGAAGCTGGCTGTG |
| | CTGAAGGCTGATTTGGAGAAAAAGAAGCAGAGCATGGGCAAGCTGTACTCCCTGA |
| | AACAGGACCTGCTGAGCACCCTGAAGAATAAGTCCGTGACCCAGAAAACCGAAGC |
| | TTGGCTGGACAACTTCGCGCGCTGCTGGGATAACCTGGTGCAGAAGCTGGAGAAG |
| | AGCACCGCCCAGATTTCTCAAGCAGTGACCACAACCCAGCCCAGCCTGACCCAGA |
| | CTACAGTAATGGAGACAGTCACTACCGTGACCACCCGGGAGCAGATCCTGGTGAA |
| | GCACGCCCAGGAAGAGCTGCCGCCCCCACCACCCCAGAAAAAGCGGACCCTGGAG |
| | CGCCTGCAGGAGCTCCAGGAGGCCACCGACGAACTGGATCTGAAGCTGAGGCAGG |
| | CCGAGGTGATTAAGGGATCCTGGCAGCCTGTGGGAGACCTGCTGATCGACAGCCT |
| | GCAGGATCATCTGGAGAAAGTCAAAGCTCTGAGAGGGGAGATCGCCCCACTGAAG |
| | GAGAACGTGAGCCACGTGAATGACCTGGCTAGACAGCTGACCACCTTGGGCATTC |
| | AGCTGAGTCCTTACAATCTGTCAACTCTGGAGGATCTGAACACCCGGTGGAAACT |
| | GCTGCAGGTGGCTGTGGAAGATCGGGTGCGCCAGTTACATGAGGCCCACAGGGAC |
| | TTTGGCCCAGCCTCACAGCACTTTCTGTCAACCTCTGTGCAAGGACCTTGGGAGA |
| | GAGCAATCAGCCCAAACAAGGTGCCATATTATATCAATCATGAGACTCAGACAAC |
| | TTGCTGGGATCACCCCAAGATGACAGAACTCTATCAGTCACTCGCCGATCTCAAT |
| | AATGTACGGTTCTCTGCCTACCGGACAGCTATGAAGCTGCGGAGGCTGCAGAAGG |
| | CACTCTGTCTGGACCTGCTGAGTCTCTCTGCGGCCTGCGATGCCCTGGATCAACA |
| | TAACCTGAAGCAGAATGATCAGCCTATGGACATCCTGCAGATCATTAACTGTCTC |
| | ACCACAATCTACGATCGGCTGGAACAGGAACATAACAACCTGGTGAATGTGCCAC |
| | TGTGTGTGGACATGTGCCTGAATTGGCTGCTCAACGTCTACGATACAGGCAGGAC |
| | TGGCAGGATCCGCGTGCTGAGCTTTAAAACCGGCATCATCTCTCTGTGCAAAGCC |
| | CACCTGGAGGACAAATATCGGTACCTGTTTAAGCAGGTGGCCTCCAGCACAGGCT |
| | TCTGTGATCAGCGCCGGCTGGGCCTGCTGCTGCACGACAGCATTCAGATCCCTAG |
| | GCAGCTGGGCGAGGTGGCCTCCTTCGGCGGCTCAAACATTGAACCCAGCGTGAGA |
| | TCTTGCTTTCAGTTTGCAAATAATAAACCCGAGATCGAGGCCGCCCTGTTCCTGG |
| | ATTGGATGAGACTGGAGCCTCAGAGTATGGTGTGGCTGCCAGTGCTGCATAGAGT |
| | GGCCGCCGCTGAGACGGCCAAGCACCAGGCAAAGTGCAATATCTGCAAGGAATGC |
| | CCCATTATTGGCTTTCGATACCGGTCCTTGAAACACTTCAATTATGACATCTGCC |
| | AGTCATGCTTCTTCAGCGGACGCGTGGCCAAGGGACACAAGATGCATTATCCTAT |
| | GGTGGAATACTGCACTCCAACTACTTCCGGCGAGGACGTGAGAGATTTCGCTAAA |
| | GTTCTTAAAAACAAATTTCGGACTAAGAGGTACTTCGCCAAGCACCCCCGCATGG |
| | GCTATCTGCCTGTGCAGACAGTGCTTGAAGGAGACAACATGGAAACCGATACAAT |
| | GTGA (SEQ ID NO: 2406) |
| First DRG de- | CAACAAAATCACTGATGCTGGA (SEQ ID NO: 2400) |
| targeting miRNA | |
| binding site | |
| Second DRG de- | CAACAAAATCACTGATGCTGGA (SEQ ID NO: 2400) |
| targeting miRNA | |
| binding site | |
| Short polyA | AGGAATAAAATATCTTTATTTTCATTACATCTGTGTGTTGGTTTTTTGTGTG |
| | (SEQ ID NO: 2410) |
| AAV2 ITR | AGGAACCCCTAGTGATGGAGTTGGCCACTCCCTCTCTGCGCGCTCGCTCGCTCAC |
| | TGAGGCCGGGCGACCAAAGGTCGCCCGACGCCCGGGCTTTGCCCGGGCGGCCTCA |
| | GTGAGCGAGCGAGCGCGC (SEQ ID NO: 2411) |

Nucleic acid 15
(SEQ ID NO: 2426)
GCGCGCTCGCTCGCTCACTGAGGCCGCCCGGGCAAAGCCCGGGCGTCGGGCGACCTTTGGTCGCCCGGCCTCAGT
GAGCGAGCGAGCGCGCAGAGAGGGAGTGGCCAACTCCATCACTAGGGGTTCCTCGTCTGTCTAATTCCAGCCAAG
GGCATGGGGGAAAGGACAGAGCCCAGGGACCTGTGGCCTATTCTCTGAGAGGACGCTGGGCTAATAATAGGAGGG
GAGATTAGGGAGGGATTTGACTGCATTGTTATCTCACAGGAATGGCGTTTGAGAGCCTTGCTTCCAAGCTCTTCC
AAGAGTCATGCCACCCCCCTCCAATCTCTGTGGAAGTGCCCACTGCCTTTCCCGCTTCGTTCTCTTCTCTCGGTC
CCATCCCTGACCCACTAGCCTGGTGCCGGGGGGAGACCAATTTCTGGAGGAAGCTCTGGGTACCCAGTCTTGCCC
TAAGCCTGCCTCTGAACAGGCTGTTCTTGTTTATGACCCCCGTCCCAGCAGAATAGTGATTGCTCATCCCTGCAT
GTGATTTGAGAGGGCCAGTCTTTCAGGCCTGGAGGAAACTCAAGCCCCACCAGCCGCTTGGCATCGGAATGCTCA
GCTGGTCCCCTCCTGGGGCTCATGTGACCAAGATCTAGCTATAAATATCAGAGGGGCCTCAGACCAAGACAGAAT
TCGGGCACCAGGAGAAGGAAGCCAACAGGATCCGACCCGGTGTTTTGTGACAAAGGCAAGACCCCCAGGTCTACT
TAGAGCAACGTTAGTAGAGGACAGCCCAGGTACCTGGGCAGGTAAGTATCAAGGTTACAAGACAGGTTTAAGGAG
ACCAATAGAAACTGGGCTTGTCGAGACAGAGAAGACTCTTGCGTTTCTGATAGGCACCTATTGGTCTTACTGACA
TCCACTTTGCCTTTCTCTCCACAGGTGTCCAGACTAGTGCCACCATGCTGTGGTGGGAAGAGGTCGAGGACTGCT
ACGAGCGCGAAGATGTGCAGAAGAAAACTTTCACTAAATGGGTGAATGCCCAGTTCTCTAAGTTCGGAAAGCAGC
ACATCGAAAACCTGTTTTCCGATCTGCAAGATGGCCGGCGGCTGCTGGACCTGCTGGAGGGGCTGACCGGACAGA
AGCTGCCTAAGGAGAAAGGATCTACCAGGGTCCATGCTCTGAATAACGTGAACAAGGCTCTGAGGGTGCTGCAGA
ACAATAACGTGGACCTGGTGAACATTGGTTCCACAGACATCGTGGATGGAAACCACAAACTGACACTGGGACTGA
TCTGGAACATCATTCTGCATTGGCAAGTGAAGAACGTGATGAAGAACATCATGGCCGGACTGCAGCAGACGAACT
CCGAGAAGATCCTGCTTAGCTGGGTGAGACAGAGTACCCGGAATTACCCACAGGTGAACGTGATCAATTTCACAA
CCAGCTGGTCAGACGGCCTGGCTCTGAATGCCCTGATTCATAGCCACCGGCCAGATCTGTTTGACTGGAACTCTG
TCGTGTGTCAGCAGTCAGCCACCCAGAGGCTGGAGCACGCCTTCAATATTGCCCGCTATCAGCTGGGGATTGAGA
AACTGCTGGACCCCGAGGATGTGGACACAACATACCCTGACAAGAAGAGCATACTTATGTATATCACAAGCCTGT
TCCAGGTGCTGCCACAGCAGGTCTCCATCGAGGCCATTCAAGAAGTGGAGATGCTGCCCAGGCCTCCTAAGGTCA
CCAAAGAGGAGCACTTTCAGCTCCATCATCAGATGCACTACAGCCAGCAAATTACCGTGTCCCTGGCCCAGGGCT
ACGAGAGGACAAGTTCCCCCAAGCCTAGATTTAAGAGCTATGCCTATACCCAGGCCGCCTACGTGACTACCTCCG
ATCCCACCAGGAGCCCATTTCCCAGCCAGCACCTGGAGGCTCCCGAAGATAAGAGCTTTGGCAGCAGCCTGATGG
AATCTGAGGTGAACCTGGACAGATACCAGACTGCGCTGGAGGAGGTGCTGTCCTGGCTGCTGAGCGCCGAGGACA
CCCTGCAGGCTCAGGGCGAGATTAGTAATGATGTGGAGGTGGTGAAGGATCAGTTTCACACTCACGAAGGCTACA
TGATGGACCTGACCGCCCACCAGGGCAGGGTGGGGAACATTCTGCAGCTCGGGAGTAAGCTGATAGGGACCGGCA
AACTGTCCGAGGATGAGGAAACCGAGGTGCAGGAGCAGATGAACCTGCTTAACTCCCGGTGGGAGTGTCTGAGAG
TGGCCAGCATGGAGAAGCAGAGCAATCTGCACAGAGTGCTGATGGATCTGCAGAATCAGAAGCTGAAGGAACTGA
ATGATTGGCTCACAAAGACAGAGGAGAGGACTAGAAAGATGGAGGAGGAGCCCCTGGGCCCTGACCTGGAGGACC
TGAAGCGACAGGTGCAGCAGCACAAGGTGCTGCAGGAGGATCTGGAGCAAGAACAAGTGAGGGTGAACTCTCTGA
CTCATATGGTTGTGGTGGTGGACGAGTCTTCCGGAGACCACGCAACTGCCGCCCTCGAGGAGCAGCTGAAGGTGC
TGGGCGATAGGTGGGCTAATATCTGTAGGTGGACCGAGGACAGATGGGTGCTGCTGCAGGATATCCTGCTGAAAT
GGCAGCGCCTGACAGAAGAGCAGTGTCTGTTCAGCGCATGGCTGAGCGAAAAGGAGGACGCTGTGAACAAGATCC
ACACTACAGGATTTAAAGACCAGAACGAGATGCTGAGTAGCCTGCAGAAGCTGGCTGTGCTGAAGGCTGATTTGG
AGAAAAAGAAGCAGAGCATGGGCAAGCTGTACTCCCTGAAACAGGACCTGCTGAGCACCCTGAAGAATAAGTCCG
TGACCCAGAAAACCGAAGCTTGGCTGGACAACTTCGCGCGCTGCTGGGATAACCTGGTGCAGAAGCTGGAGAAGA
GCACCGCCCAGATTTCTCAAGCAGTGACCACAACCCAGCCCAGCCTGACCCAGACTACAGTAATGGAGACAGTCA
CTACCGTGACCACCCGGGAGCAGATCCTGGTGAAGCACGCCCAGGAAGAGCTGCCGCCCCCACCACCCCAGAAAA
AGCGGACCCTGGAGCGCCTGCAGGAGCTCCAGGAGGCCACCGACGAACTGGATCTGAAGCTGAGGCAGGCCGAGG
TGATTAAGGGATCCTGGCAGCCTGTGGGAGACCTGCTGATCGACAGCCTGCAGGATCATCTGGAGAAAGTCAAAG
CTCTGAGAGGGGAGATCGCCCCACTGAAGGAGAACGTGAGCCACGTGAATGACCTGGCTAGACAGCTGACCACCT
TGGGCATTCAGCTGAGTCCTTACAATCTGTCAACTCTGGAGGATCTGAACACCCGGTGGAAACTGCTGCAGGTGG
CTGTGGAAGATCGGGTGCGCCAGTTACATGAGGCCCACAGGGACTTTGGCCCAGCCTCACAGCACTTTCTGTCAA
CCTCTGTGCAAGGACCTTGGGAGAGAGCAATCAGCCCAAACAAGGTGCCATATTATATCAATCATGAGACTCAGA
CAACTTGCTGGGATCACCCCAAGATGACAGAACTCTATCAGTCACTCGCCGATCTCAATAATGTACGGTTCTCTG
CCTACCGGACAGCTATGAAGCTGCGGAGGCTGCAGAAGGCACTCTGTCTGGACCTGCTGAGTCTCTCTGCGGCCT
GCGATGCCCTGGATCAACATAACCTGAAGCAGAATGATCAGCCTATGGACATCCTGCAGATCATTAACTGTCTCA
CCACAATCTACGATCGGCTGGAACAGGAACATAACAACCTGGTGAATGTGCCACTGTGTGTGGACATGTGCCTGA
ATTGGCTGCTCAACGTCTACGATACAGGCAGGACTGGCAGGATCCGCGTGCTGAGCTTTAAAACCGGCATCATCT
CTCTGTGCAAAGCCCACCTGGAGGACAAATATCGGTACCTGTTTAAGCAGGTGGCCTCCAGCACAGGCTTCTGTG
ATCAGCGCCGGCTGGGCCTGCTGCTGCACGACAGCATTCAGATCCCTAGGCAGCTGGGCGAGGTGGCCTCCTTCG
GCGGCTCAAACATTGAACCCAGCGTGAGATCTTGCTTTCAGTTTGCAAATAATAAACCCGAGATCGAGGCCGCCC
TGTTCCTGGATTGGATGAGACTGGAGCCTCAGAGTATGGTGTGGCTGCCAGTGCTGCATAGAGTGGCCGCCGCTG
AGACGGCCAAGCACCAGGCAAAGTGCAATATCTGCAAGGAATGCCCCATTATTGGCTTTCGATACCGGTCCTTGA
AACACTTCAATTATGACATCTGCCAGTCATGCTTCTTCAGCGGACGCGTGGCCAAGGGACACAAGATGCATTATC
CTATGGTGGAATACTGCACTCCAACTACTTCCGGCGAGGACGTGAGAGATTTCGCTAAAGTTCTTAAAAACAAAT
TTCGGACTAAGAGGTACTTCGCCAAGCACCCCCGCATGGGCTATCTGCCTGTGCAGACAGTGCTTGAAGGAGACA
ACATGGAAACCGATACAATGTGATAGATTCCGGCCTGATTCACAACACCAGCTAGATCAGCGGCCTGATTCACAA
CACCAGCTAGACGCAGGAATAAAATATCTTTATTTTCATTACATCTGTGTGTTGGTTTTTTGTGTGAGGAACCCC
TAGTGATGGAGTTGGCCACTCCCTCTCTGCGCGCTCGCTCGCTCACTGAGGCCGGGCGACCAAAGGTCGCCCGAC
GCCCGGGCTTTGCCCGGGCGGCCTCAGTGAGCGAGCGAGCGCGC

| Nucleic acid | |
|---|---|
| cargo 15 | |
| annotated | Sequence |
| AAV2 ITR | GCGCGCTCGCTCGCTCACTGAGGCCGCCCGGGCAAAGCCCGGGCGTCGGGCGACC |
| | TTTGGTCGCCCGGCCTCAGTGAGCGAGCGAGCGCGCAGAGAGGGAGTGGCCAACT |
| | CCATCACTAGGGGTTCCT (SEQ ID NO: 2408) |
| Novel promoter | CGTCTGTCTAATTCCAGCCAAGGGCATGGGGGAAAGGACAGAGCCCAGGGACCTG |
| | TGGCCTATTCTCTGAGAGGACGCTGGGCTAATAATAGGAGGGGAGATTAGGGAGG |
| | GATTTGACTGCATTGTTATCTCACAGGAATGGCGTTTGAGAGCCTTGCTTCCAAG |
| | CTCTTCCAAGAGTCATGCCACCCCCCTCCAATCTCTGTGGAAGTGCCCACTGCCT |
| | TTCCCGCTTCGTTCTCTTCTCTCGGTCCCATCCCTGACCCACTAGCCTGGTGCCG |
| | GGGGGAGACCAATTTCTGGAGGAAGCTCTGGGTACCCAGTCTTGCCCTAAGCCTG |
| | CCTCTGAACAGGCTGTTCTTGTTTATGACCCCCGTCCCAGCAGAATAGTGATTGC |
| | TCATCCCTGCATGTGATTTGAGAGGGCCAGTCTTTCAGGCCTGGAGGAAACTCAA |
| | GCCCCACCAGCCGCTTGGCATCGGAATGCTCAGCTGGTCCCCTCCTGGGGCTCAT |
| | GTGACCAAGATCTAGCTATAAATATCAGAGGGGCCTCAGACCAAGACAGAATTCG |
| | GGCACCAGGAGAAGGAAGCCAACAGGATCCGACCCGGTGTTTTGTGACAAAGGCA |
| | AGACCCCCAGGTCTACTTAGAGCAACGTTAGTAGAGGA (SEQ ID NO: |
| | 2404) |
| Intron | GTAAGTATCAAGGTTACAAGACAGGTTTAAGGAGACCAATAGAAACTGGGCTTGT |
| | CGAGACAGAGAAGACTCTTGCGTTTCTGATAGGCACCTATTGGTCTTACTGACAT |
| | CCACTTTGCCTTTCTCTCCACAG (SEQ ID NO: 2409) |
| Codon optimized | ATGCTGTGGTGGGAAGAGGTCGAGGACTGCTACGAGCGCGAAGATGTGCAGAAGA |
| microdystrophin | AAACTTTCACTAAATGGGTGAATGCCCAGTTCTCTAAGTTCGGAAAGCAGCACAT |
| coding sequence | CGAAAACCTGTTTTCCGATCTGCAAGATGGCCGGCGGCTGCTGGACCTGCTGGAG |
| | GGGCTGACCGGACAGAAGCTGCCTAAGGAGAAAGGATCTACCAGGGTCCATGCTC |
| | TGAATAACGTGAACAAGGCTCTGAGGGTGCTGCAGAACAATAACGTGGACCTGGT |
| | GAACATTGGTTCCACAGACATCGTGGATGGAAACCACAAACTGACACTGGGACTG |
| | ATCTGGAACATCATTCTGCATTGGCAAGTGAAGAACGTGATGAAGAACATCATGG |
| | CCGGACTGCAGCAGACGAACTCCGAGAAGATCCTGCTTAGCTGGGTGAGACAGAG |
| | TACCCGGAATTACCCACAGGTGAACGTGATCAATTTCACAACCAGCTGGTCAGAC |
| | GGCCTGGCTCTGAATGCCCTGATTCATAGCCACCGGCCAGATCTGTTTGACTGGA |
| | ACTCTGTCGTGTGTCAGCAGTCAGCCACCCAGAGGCTGGAGCACGCCTTCAATAT |
| | TGCCCGCTATCAGCTGGGGATTGAGAAACTGCTGGACCCCGAGGATGTGGACACA |
| | ACATACCCTGACAAGAAGAGCATACTTATGTATATCACAAGCCTGTTCCAGGTGC |
| | TGCCACAGCAGGTCTCCATCGAGGCCATTCAAGAAGTGGAGATGCTGCCCAGGCC |
| | TCCTAAGGTCACCAAAGAGGAGCACTTTCAGCTCCATCATCAGATGCACTACAGC |
| | CAGCAAATTACCGTGTCCCTGGCCCAGGGCTACGAGAGGACAAGTTCCCCCAAGC |
| | CTAGATTTAAGAGCTATGCCTATACCCAGGCCGCCTACGTGACTACCTCCGATCC |
| | CACCAGGAGCCCATTTCCCAGCCAGCACCTGGAGGCTCCCGAAGATAAGAGCTTT |
| | GGCAGCAGCCTGATGGAATCTGAGGTGAACCTGGACAGATACCAGACTGCGCTGG |
| | AGGAGGTGCTGTCCTGGCTGCTGAGCGCCGAGGACACCCTGCAGGCTCAGGGCGA |
| | GATTAGTAATGATGTGGAGGTGGTGAAGGATCAGTTTCACACTCACGAAGGCTAC |
| | ATGATGGACCTGACCGCCCACCAGGGCAGGGTGGGGAACATTCTGCAGCTCGGGA |
| | GTAAGCTGATAGGGACCGGCAAACTGTCCGAGGATGAGGAAACCGAGGTGCAGGA |
| | GCAGATGAACCTGCTTAACTCCCGGTGGGAGTGTCTGAGAGTGGCCAGCATGGAG |
| | AAGCAGAGCAATCTGCACAGAGTGCTGATGGATCTGCAGAATCAGAAGCTGAAGG |
| | AACTGAATGATTGGCTCACAAAGACAGAGGAGAGGACTAGAAAGATGGAGGAGGA |
| | GCCCCTGGGCCCTGACCTGGAGGACCTGAAGCGACAGGTGCAGCAGCACAAGGTG |
| | CTGCAGGAGGATCTGGAGCAAGAACAAGTGAGGGTGAACTCTCTGACTCATATGG |
| | TTGTGGTGGTGGACGAGTCTTCCGGAGACCACGCAACTGCCGCCCTCGAGGAGCA |
| | GCTGAAGGTGCTGGGCGATAGGTGGGCTAATATCTGTAGGTGGACCGAGGACAGA |
| | TGGGTGCTGCTGCAGGATATCCTGCTGAAATGGCAGCGCCTGACAGAAGAGCAGT |
| | GTCTGTTCAGCGCATGGCTGAGCGAAAAGGAGGACGCTGTGAACAAGATCCACAC |
| | TACAGGATTTAAAGACCAGAACGAGATGCTGAGTAGCCTGCAGAAGCTGGCTGTG |
| | CTGAAGGCTGATTTGGAGAAAAAGAAGCAGAGCATGGGCAAGCTGTACTCCCTGA |
| | AACAGGACCTGCTGAGCACCCTGAAGAATAAGTCCGTGACCCAGAAAACCGAAGC |
| | TTGGCTGGACAACTTCGCGCGCTGCTGGGATAACCTGGTGCAGAAGCTGGAGAAG |
| | AGCACCGCCCAGATTTCTCAAGCAGTGACCACAACCCAGCCCAGCCTGACCCAGA |
| | CTACAGTAATGGAGACAGTCACTACCGTGACCACCCGGGAGCAGATCCTGGTGAA |
| | GCACGCCCAGGAAGAGCTGCCGCCCCCACCACCCCAGAAAAAGCGGACCCTGGAG |
| | CGCCTGCAGGAGCTCCAGGAGGCCACCGACGAACTGGATCTGAAGCTGAGGCAGG |
| | CCGAGGTGATTAAGGGATCCTGGCAGCCTGTGGGAGACCTGCTGATCGACAGCCT |
| | GCAGGATCATCTGGAGAAAGTCAAAGCTCTGAGAGGGGAGATCGCCCCACTGAAG |
| | GAGAACGTGAGCCACGTGAATGACCTGGCTAGACAGCTGACCACCTTGGGCATTC |
| | AGCTGAGTCCTTACAATCTGTCAACTCTGGAGGATCTGAACACCCGGTGGAAACT |
| | GCTGCAGGTGGCTGTGGAAGATCGGGTGCGCCAGTTACATGAGGCCCACAGGGAC |
| | TTTGGCCCAGCCTCACAGCACTTTCTGTCAACCTCTGTGCAAGGACCTTGGGAGA |
| | GAGCAATCAGCCCAAACAAGGTGCCATATTATATCAATCATGAGACTCAGACAAC |
| | TTGCTGGGATCACCCCAAGATGACAGAACTCTATCAGTCACTCGCCGATCTCAAT |
| | AATGTACGGTTCTCTGCCTACCGGACAGCTATGAAGCTGCGGAGGCTGCAGAAGG |
| | CACTCTGTCTGGACCTGCTGAGTCTCTCTGCGGCCTGCGATGCCCTGGATCAACA |
| | TAACCTGAAGCAGAATGATCAGCCTATGGACATCCTGCAGATCATTAACTGTCTC |
| | ACCACAATCTACGATCGGCTGGAACAGGAACATAACAACCTGGTGAATGTGCCAC |
| | TGTGTGTGGACATGTGCCTGAATTGGCTGCTCAACGTCTACGATACAGGCAGGAC |
| | TGGCAGGATCCGCGTGCTGAGCTTTAAAACCGGCATCATCTCTCTGTGCAAAGCC |
| | CACCTGGAGGACAAATATCGGTACCTGTTTAAGCAGGTGGCCTCCAGCACAGGCT |
| | TCTGTGATCAGCGCCGGCTGGGCCTGCTGCTGCACGACAGCATTCAGATCCCTAG |
| | GCAGCTGGGCGAGGTGGCCTCCTTCGGCGGCTCAAACATTGAACCCAGCGTGAGA |
| | TCTTGCTTTCAGTTTGCAAATAATAAACCCGAGATCGAGGCCGCCCTGTTCCTGG |
| | ATTGGATGAGACTGGAGCCTCAGAGTATGGTGTGGCTGCCAGTGCTGCATAGAGT |
| | GGCCGCCGCTGAGACGGCCAAGCACCAGGCAAAGTGCAATATCTGCAAGGAATGC |
| | CCCATTATTGGCTTTCGATACCGGTCCTTGAAACACTTCAATTATGACATCTGCC |
| | AGTCATGCTTCTTCAGCGGACGCGTGGCCAAGGGACACAAGATGCATTATCCTAT |
| | GGTGGAATACTGCACTCCAACTACTTCCGGCGAGGACGTGAGAGATTTCGCTAAA |
| | GTTCTTAAAAACAAATTTCGGACTAAGAGGTACTTCGCCAAGCACCCCCGCATGG |
| | GCTATCTGCCTGTGCAGACAGTGCTTGAAGGAGACAACATGGAAACCGATACAAT |
| | GTGA |
| | (SEQ ID NO: 2406) |
| First DRG de- | CGGCCTGATTCACAACACCAGCT (SEQ ID NO: 2400) |
| targeting miRNA | |
| binding site | |
| Second DRG de- | CGGCCTGATTCACAACACCAGCT (SEQ ID NO: 2400) |
| targeting miRNA | |
| binding site | |
| Short polyA | AGGAATAAAATATCTTTATTTTCATTACATCTGTGTGTTGGTTTTTTGTGTG |
| | (SEQ ID NO: 2410) |
| AAV2 ITR | AGGAACCCCTAGTGATGGAGTTGGCCACTCCCTCTCTGCGCGCTCGCTCGCTCAC |
| | TGAGGCCGGGCGACCAAAGGTCGCCCGACGCCCGGGCTTTGCCCGGGCGGCCTCA |
| | GTGAGCGAGCGAGCGCGC (SEQ ID NO: 2411) |

Nucleic acid 16
(SEQ ID NO: 2427)
GCGCGCTCGCTCGCTCACTGAGGCCGCCCGGGCAAAGCCCGGGCGTCGGGCGACCTTTGGTCGCCCGGCCTCAGT
GAGCGAGCGAGCGCGCAGAGAGGGAGTGGCCAACTCCATCACTAGGGGTTCCTTAGTTATTAATAGTAATCAATT
ACGGGGTCATTAGTTCATAGCCCATATATGGAGTTCCGCGTTACATAACTTACGGTAAATGGCCCGCCTGGCTGA
CCGCCCAACGACCCCCGCCCATTGACGTCAATAATGACGTATGTTCCCATAGTAACGCCAATAGGGACTTTCCAT
TGACGTCAATGGGTGGAGTATTTACGGTAAACTGCCCACTTGGCAGTACATCAAGTGTATCATATGCCAAGTACG
CCCCCTATTGACGTCAATGACGGTAAATGGCCCGCCTGGCATTATGCCCAGTACATGACCTTATGGGACTTTCCT
ACTTGGCAGTACATCTACGTATTAGTCATCGCTATTACCATGCTAGACTAGCATGCTGCCCATGTAAGGAGGCAA
GGCCTGGGGACACCCGAGATGCCTGGTTATAATTAACCCAGACATGTGGCTGCCCCCCCCCCCCAACACCTGCTG
CCTCTAAAAATAACCCTGCATGCCATGTTCCCGGCGAAGGGCCAGCTGTCCCCCGCCAGCTAGACTCAGCTCTCA
GGGGCCCCTCCCTGGGGACAGCCCCTCCTGGCTAGTCACACCCTGTAGGCTCCTCTATATAACCCAGGGGCACAG
GGGCTGCCCTCATTCTACCACCACCTCCACAGCACAGACAGACACTCAGGAGCCAGCCAGCCAGCCCAGGTACCT
GGGCAGGTAAGTATCAAGGTTACAAGACAGGTTTAAGGAGACCAATAGAAACTGGGCTTGTCGAGACAGAGAAGA
CTCTTGCGTTTCTGATAGGCACCTATTGGTCTTACTGACATCCACTTTGCCTTTCTCTCCACAGGTGTCCAGACT
AGTGCCACCATGCTGTGGTGGGAAGAGGTCGAGGACTGCTACGAGCGCGAAGATGTGCAGAAGAAAACTTTCACT
AAATGGGTGAATGCCCAGTTCTCTAAGTTCGGAAAGCAGCACATCGAAAACCTGTTTTCCGATCTGCAAGATGGC
CGGCGGCTGCTGGACCTGCTGGAGGGGCTGACCGGACAGAAGCTGCCTAAGGAGAAAGGATCTACCAGGGTCCAT
GCTCTGAATAACGTGAACAAGGCTCTGAGGGTGCTGCAGAACAATAACGTGGACCTGGTGAACATTGGTTCCACA
GACATCGTGGATGGAAACCACAAACTGACACTGGGACTGATCTGGAACATCATTCTGCATTGGCAAGTGAAGAAC
GTGATGAAGAACATCATGGCCGGACTGCAGCAGACGAACTCCGAGAAGATCCTGCTTAGCTGGGTGAGACAGAGT
ACCCGGAATTACCCACAGGTGAACGTGATCAATTTCACAACCAGCTGGTCAGACGGCCTGGCTCTGAATGCCCTG
ATTCATAGCCACCGGCCAGATCTGTTTGACTGGAACTCTGTCGTGTGTCAGCAGTCAGCCACCCAGAGGCTGGAG
CACGCCTTCAATATTGCCCGCTATCAGCTGGGGATTGAGAAACTGCTGGACCCCGAGGATGTGGACACAACATAC
CCTGACAAGAAGAGCATACTTATGTATATCACAAGCCTGTTCCAGGTGCTGCCACAGCAGGTCTCCATCGAGGCC
ATTCAAGAAGTGGAGATGCTGCCCAGGCCTCCTAAGGTCACCAAAGAGGAGCACTTTCAGCTCCATCATCAGATG
CACTACAGCCAGCAAATTACCGTGTCCCTGGCCCAGGGCTACGAGAGGACAAGTTCCCCCAAGCCTAGATTTAAG
AGCTATGCCTATACCCAGGCCGCCTACGTGACTACCTCCGATCCCACCAGGAGCCCATTTCCCAGCCAGCACCTG
GAGGCTCCCGAAGATAAGAGCTTTGGCAGCAGCCTGATGGAATCTGAGGTGAACCTGGACAGATACCAGACTGCG
CTGGAGGAGGTGCTGTCCTGGCTGCTGAGCGCCGAGGACACCCTGCAGGCTCAGGGCGAGATTAGTAATGATGTG
GAGGTGGTGAAGGATCAGTTTCACACTCACGAAGGCTACATGATGGACCTGACCGCCCACCAGGGCAGGGTGGGG
AACATTCTGCAGCTCGGGAGTAAGCTGATAGGGACCGGCAAACTGTCCGAGGATGAGGAAACCGAGGTGCAGGAG
CAGATGAACCTGCTTAACTCCCGGTGGGAGTGTCTGAGAGTGGCCAGCATGGAGAAGCAGAGCAATCTGCACAGA
GTGCTGATGGATCTGCAGAATCAGAAGCTGAAGGAACTGAATGATTGGCTCACAAAGACAGAGGAGAGGACTAGA
AAGATGGAGGAGGAGCCCCTGGGCCCTGACCTGGAGGACCTGAAGCGACAGGTGCAGCAGCACAAGGTGCTGCAG
GAGGATCTGGAGCAAGAACAAGTGAGGGTGAACTCTCTGACTCATATGGTTGTGGTGGTGGACGAGTCTTCCGGA
GACCACGCAACTGCCGCCCTCGAGGAGCAGCTGAAGGTGCTGGGCGATAGGTGGGCTAATATCTGTAGGTGGACC
GAGGACAGATGGGTGCTGCTGCAGGATATCCTGCTGAAATGGCAGCGCCTGACAGAAGAGCAGTGTCTGTTCAGC
GCATGGCTGAGCGAAAAGGAGGACGCTGTGAACAAGATCCACACTACAGGATTTAAAGACCAGAACGAGATGCTG
AGTAGCCTGCAGAAGCTGGCTGTGCTGAAGGCTGATTTGGAGAAAAAGAAGCAGAGCATGGGCAAGCTGTACTCC
CTGAAACAGGACCTGCTGAGCACCCTGAAGAATAAGTCCGTGACCCAGAAAACCGAAGCTTGGCTGGACAACTTC
GCGCGCTGCTGGGATAACCTGGTGCAGAAGCTGGAGAAGAGCACCGCCCAGATTTCTCAAGCAGTGACCACAACC
CAGCCCAGCCTGACCCAGACTACAGTAATGGAGACAGTCACTACCGTGACCACCCGGGAGCAGATCCTGGTGAAG
CACGCCCAGGAAGAGCTGCCGCCCCCACCACCCCAGAAAAAGCGGACCCTGGAGCGCCTGCAGGAGCTCCAGGAG
GCCACCGACGAACTGGATCTGAAGCTGAGGCAGGCCGAGGTGATTAAGGGATCCTGGCAGCCTGTGGGAGACCTG
CTGATCGACAGCCTGCAGGATCATCTGGAGAAAGTCAAAGCTCTGAGAGGGGAGATCGCCCCACTGAAGGAGAAC
GTGAGCCACGTGAATGACCTGGCTAGACAGCTGACCACCTTGGGCATTCAGCTGAGTCCTTACAATCTGTCAACT
CTGGAGGATCTGAACACCCGGTGGAAACTGCTGCAGGTGGCTGTGGAAGATCGGGTGCGCCAGTTACATGAGGCC
CACAGGGACTTTGGCCCAGCCTCACAGCACTTTCTGTCAACCTCTGTGCAAGGACCTTGGGAGAGAGCAATCAGC
CCAAACAAGGTGCCATATTATATCAATCATGAGACTCAGACAACTTGCTGGGATCACCCCAAGATGACAGAACTC
TATCAGTCACTCGCCGATCTCAATAATGTACGGTTCTCTGCCTACCGGACAGCTATGAAGCTGCGGAGGCTGCAG
AAGGCACTCTGTCTGGACCTGCTGAGTCTCTCTGCGGCCTGCGATGCCCTGGATCAACATAACCTGAAGCAGAAT
GATCAGCCTATGGACATCCTGCAGATCATTAACTGTCTCACCACAATCTACGATCGGCTGGAACAGGAACATAAC
AACCTGGTGAATGTGCCACTGTGTGTGGACATGTGCCTGAATTGGCTGCTCAACGTCTACGATACAGGCAGGACT
GGCAGGATCCGCGTGCTGAGCTTTAAAACCGGCATCATCTCTCTGTGCAAAGCCCACCTGGAGGACAAATATCGG
TACCTGTTTAAGCAGGTGGCCTCCAGCACAGGCTTCTGTGATCAGCGCCGGCTGGGCCTGCTGCTGCACGACAGC
ATTCAGATCCCTAGGCAGCTGGGCGAGGTGGCCTCCTTCGGCGGCTCAAACATTGAACCCAGCGTGAGATCTTGC
TTTCAGTTTGCAAATAATAAACCCGAGATCGAGGCCGCCCTGTTCCTGGATTGGATGAGACTGGAGCCTCAGAGT
ATGGTGTGGCTGCCAGTGCTGCATAGAGTGGCCGCCGCTGAGACGGCCAAGCACCAGGCAAAGTGCAATATCTGC
AAGGAATGCCCCATTATTGGCTTTCGATACCGGTCCTTGAAACACTTCAATTATGACATCTGCCAGTCATGCTTC
TTCAGCGGACGCGTGGCCAAGGGACACAAGATGCATTATCCTATGGTGGAATACTGCACTCCAACTACTTCCGGC
GAGGACGTGAGAGATTTCGCTAAAGTTCTTAAAAACAAATTTCGGACTAAGAGGTACTTCGCCAAGCACCCCCGC
ATGGGCTATCTGCCTGTGCAGACAGTGCTTGAAGGAGACAACATGGAAACCGATACAATGTGATAGATTCTCATA
CAGCTAGATAACCAAAGAAGATCAGTCATACAGCTAGATAACCAAAGA
AGACGCAGGAATAAAATATCTTTATTTTCATTACATCTGTGTGTTGGTTTTTTGTGTGAGGAACCCCTAGTGATG
GAGTTGGCCACTCCCTCTCTGCGCGCTCGCTCGCTCACTGAGGCCGGGCGACCAAAGGTCGCCCGACGCCCGGGC
TTTGCCCGGGCGGCCTCAGTGAGCGAGCGAGCGCGC

| Nucleic acid | |
|---|---|
| cargo 16 | |
| annotated | Sequence |
| AAV2 ITR | GCGCGCTCGCTCGCTCACTGAGGCCGCCCGGGCAAAGCCCGGGCGTCGGGCGACCT |
| | TTGGTCGCCCGGCCTCAGTGAGCGAGCGAGCGCGCAGAGAGGGAGTGGCCAACTCC |
| | ATCACTAGGGGTTCCT (SEQ ID NO: 2408) |
| Novel promoter | TAGTTATTAATAGTAATCAATTACGGGGTCATTAGTTCATAGCCCATATATGGAGT |
| | TCCGCGTTACATAACTTACGGTAAATGGCCCGCCTGGCTGACCGCCCAACGACCCC |
| | CGCCCATTGACGTCAATAATGACGTATGTTCCCATAGTAACGCCAATAGGGACTTT |
| | CCATTGACGTCAATGGGTGGAGTATTTACGGTAAACTGCCCACTTGGCAGTACATC |
| | AAGTGTATCATATGCCAAGTACGCCCCCTATTGACGTCAATGACGGTAAATGGCCC |
| | GCCTGGCATTATGCCCAGTACATGACCTTATGGGACTTTCCTACTTGGCAGTACAT |
| | CTACGTATTAGTCATCGCTATTACCATGCTAGACTAGCATGCTGCCCATGTAAGGA |
| | GGCAAGGCCTGGGGACACCCGAGATGCCTGGTTATAATTAACCCAGACATGTGGCT |
| | GCCCCCCCCCCCCAACACCTGCTGCCTCTAAAAATAACCCTGCATGCCATGTTCCC |
| | GGCGAAGGGCCAGCTGTCCCCCGCCAGCTAGACTCAGCTCTCAGGGGCCCCTCCCT |
| | GGGGACAGCCCCTCCTGGCTAGTCACACCCTGTAGGCTCCTCTATATAACCCAGGG |
| | GCACAGGGGCTGCCCTCATTCTACCACCACCTCCACAGCACAGACAGACACTCAGG |
| | AGCCAGCCAGC (SEQ ID NO: 2402) |
| Intron | GTAAGTATCAAGGTTACAAGACAGGTTTAAGGAGACCAATAGAAACTGGGCTTGTC |
| | GAGACAGAGAAGACTCTTGCGTTTCTGATAGGCACCTATTGGTCTTACTGACATCC |
| | ACTTTGCCTTTCTCTCCACAG (SEQ ID NO: 2409) |
| Codon | ATGCTGTGGTGGGAAGAGGTCGAGGACTGCTACGAGCGCGAAGATGTGCAGAAGAA |
| optimized | AACTTTCACTAAATGGGTGAATGCCCAGTTCTCTAAGTTCGGAAAGCAGCACATCG |
| microdystrophin | AAAACCTGTTTTCCGATCTGCAAGATGGCCGGCGGCTGCTGGACCTGCTGGAGGGG |
| coding | CTGACCGGACAGAAGCTGCCTAAGGAGAAAGGATCTACCAGGGTCCATGCTCTGAA |
| sequence | TAACGTGAACAAGGCTCTGAGGGTGCTGCAGAACAATAACGTGGACCTGGTGAACA |
| | TTGGTTCCACAGACATCGTGGATGGAAACCACAAACTGACACTGGGACTGATCTGG |
| | AACATCATTCTGCATTGGCAAGTGAAGAACGTGATGAAGAACATCATGGCCGGACT |
| | GCAGCAGACGAACTCCGAGAAGATCCTGCTTAGCTGGGTGAGACAGAGTACCCGGA |
| | ATTACCCACAGGTGAACGTGATCAATTTCACAACCAGCTGGTCAGACGGCCTGGCT |
| | CTGAATGCCCTGATTCATAGCCACCGGCCAGATCTGTTTGACTGGAACTCTGTCGT |
| | GTGTCAGCAGTCAGCCACCCAGAGGCTGGAGCACGCCTTCAATATTGCCCGCTATC |
| | AGCTGGGGATTGAGAAACTGCTGGACCCCGAGGATGTGGACACAACATACCCTGAC |
| | AAGAAGAGCATACTTATGTATATCACAAGCCTGTTCCAGGTGCTGCCACAGCAGGT |
| | CTCCATCGAGGCCATTCAAGAAGTGGAGATGCTGCCCAGGCCTCCTAAGGTCACCA |
| | AAGAGGAGCACTTTCAGCTCCATCATCAGATGCACTACAGCCAGCAAATTACCGTG |
| | TCCCTGGCCCAGGGCTACGAGAGGACAAGTTCCCCCAAGCCTAGATTTAAGAGCTA |
| | TGCCTATACCCAGGCCGCCTACGTGACTACCTCCGATCCCACCAGGAGCCCATTTC |
| | CCAGCCAGCACCTGGAGGCTCCCGAAGATAAGAGCTTTGGCAGCAGCCTGATGGAA |
| | TCTGAGGTGAACCTGGACAGATACCAGACTGCGCTGGAGGAGGTGCTGTCCTGGCT |
| | GCTGAGCGCCGAGGACACCCTGCAGGCTCAGGGCGAGATTAGTAATGATGTGGAGG |
| | TGGTGAAGGATCAGTTTCACACTCACGAAGGCTACATGATGGACCTGACCGCCCAC |
| | CAGGGCAGGGTGGGGAACATTCTGCAGCTCGGGAGTAAGCTGATAGGGACCGGCAA |
| | ACTGTCCGAGGATGAGGAAACCGAGGTGCAGGAGCAGATGAACCTGCTTAACTCCC |
| | GGTGGGAGTGTCTGAGAGTGGCCAGCATGGAGAAGCAGAGCAATCTGCACAGAGTG |
| | CTGATGGATCTGCAGAATCAGAAGCTGAAGGAACTGAATGATTGGCTCACAAAGAC |
| | AGAGGAGAGGACTAGAAAGATGGAGGAGGAGCCCCTGGGCCCTGACCTGGAGGACC |
| | TGAAGCGACAGGTGCAGCAGCACAAGGTGCTGCAGGAGGATCTGGAGCAAGAACAA |
| | GTGAGGGTGAACTCTCTGACTCATATGGTTGTGGTGGTGGACGAGTCTTCCGGAGA |
| | CCACGCAACTGCCGCCCTCGAGGAGCAGCTGAAGGTGCTGGGCGATAGGTGGGCTA |
| | ATATCTGTAGGTGGACCGAGGACAGATGGGTGCTGCTGCAGGATATCCTGCTGAAA |
| | TGGCAGCGCCTGACAGAAGAGCAGTGTCTGTTCAGCGCATGGCTGAGCGAAAAGGA |
| | GGACGCTGTGAACAAGATCCACACTACAGGATTTAAAGACCAGAACGAGATGCTGA |
| | GTAGCCTGCAGAAGCTGGCTGTGCTGAAGGCTGATTTGGAGAAAAAGAAGCAGAGC |
| | ATGGGCAAGCTGTACTCCCTGAAACAGGACCTGCTGAGCACCCTGAAGAATAAGTC |
| | CGTGACCCAGAAAACCGAAGCTTGGCTGGACAACTTCGCGCGCTGCTGGGATAACC |
| | TGGTGCAGAAGCTGGAGAAGAGCACCGCCCAGATTTCTCAAGCAGTGACCACAACC |
| | CAGCCCAGCCTGACCCAGACTACAGTAATGGAGACAGTCACTACCGTGACCACCCG |
| | GGAGCAGATCCTGGTGAAGCACGCCCAGGAAGAGCTGCCGCCCCCACCACCCCAGA |
| | AAAAGCGGACCCTGGAGCGCCTGCAGGAGCTCCAGGAGGCCACCGACGAACTGGAT |
| | CTGAAGCTGAGGCAGGCCGAGGTGATTAAGGGATCCTGGCAGCCTGTGGGAGACCT |
| | GCTGATCGACAGCCTGCAGGATCATCTGGAGAAAGTCAAAGCTCTGAGAGGGGAGA |
| | TCGCCCCACTGAAGGAGAACGTGAGCCACGTGAATGACCTGGCTAGACAGCTGACC |
| | ACCTTGGGCATTCAGCTGAGTCCTTACAATCTGTCAACTCTGGAGGATCTGAACAC |
| | CCGGTGGAAACTGCTGCAGGTGGCTGTGGAAGATCGGGTGCGCCAGTTACATGAGG |
| | CCCACAGGGACTTTGGCCCAGCCTCACAGCACTTTCTGTCAACCTCTGTGCAAGGA |
| | CCTTGGGAGAGAGCAATCAGCCCAAACAAGGTGCCATATTATATCAATCATGAGAC |
| | TCAGACAACTTGCTGGGATCACCCCAAGATGACAGAACTCTATCAGTCACTCGCCG |
| | ATCTCAATAATGTACGGTTCTCTGCCTACCGGACAGCTATGAAGCTGCGGAGGCTG |
| | CAGAAGGCACTCTGTCTGGACCTGCTGAGTCTCTCTGCGGCCTGCGATGCCCTGGA |
| | TCAACATAACCTGAAGCAGAATGATCAGCCTATGGACATCCTGCAGATCATTAACT |
| | GTCTCACCACAATCTACGATCGGCTGGAACAGGAACATAACAACCTGGTGAATGTG |
| | CCACTGTGTGTGGACATGTGCCTGAATTGGCTGCTCAACGTCTACGATACAGGCAG |
| | GACTGGCAGGATCCGCGTGCTGAGCTTTAAAACCGGCATCATCTCTCTGTGCAAAG |
| | CCCACCTGGAGGACAAATATCGGTACCTGTTTAAGCAGGTGGCCTCCAGCACAGGC |
| | TTCTGTGATCAGCGCCGGCTGGGCCTGCTGCTGCACGACAGCATTCAGATCCCTAG |
| | GCAGCTGGGCGAGGTGGCCTCCTTCGGCGGCTCAAACATTGAACCCAGCGTGAGAT |
| | CTTGCTTTCAGTTTGCAAATAATAAACCCGAGATCGAGGCCGCCCTGTTCCTGGAT |
| | TGGATGAGACTGGAGCCTCAGAGTATGGTGTGGCTGCCAGTGCTGCATAGAGTGGC |
| | CGCCGCTGAGACGGCCAAGCACCAGGCAAAGTGCAATATCTGCAAGGAATGCCCCA |
| | TTATTGGCTTTCGATACCGGTCCTTGAAACACTTCAATTATGACATCTGCCAGTCA |
| | TGCTTCTTCAGCGGACGCGTGGCCAAGGGACACAAGATGCATTATCCTATGGTGGA |
| | ATACTGCACTCCAACTACTTCCGGCGAGGACGTGAGAGATTTCGCTAAAGTTCTTA |
| | AAAACAAATTTCGGACTAAGAGGTACTTCGCCAAGCACCCCCGCATGGGCTATCTG |
| | CCTGTGCAGACAGTGCTTGAAGGAGACAACATGGAAACCGATACAATGTGA (SEQ |
| | ID NO: 2406) |
| First DRG de- | TCATACAGCTAGATAACCAAAGA (SEQ ID NO: 2401) |
| targeting | |
| miRNA binding | |
| site | |
| Second DRG de- | TCATACAGCTAGATAACCAAAGA (SEQ ID NO: 2401) |
| targeting | |
| miRNA binding | |
| site | |
| Short polyA | AGGAATAAAATATCTTTATTTTCATTACATCTGTGTGTTGGTTTTTTGTGTG |
| | (SEQ ID NO: 2410) |
| AAV2 ITR | AGGAACCCCTAGTGATGGAGTTGGCCACTCCCTCTCTGCGCGCTCGCTCGCTCACT |
| | GAGGCCGGGCGACCAAAGGTCGCCCGACGCCCGGGCTTTGCCCGGGCGGCCTCAGT |
| | GAGCGAGCGAGCGCGC (SEQ ID NO: 2411) |

Nucleic acid 17
(SEQ ID NO: 2428)
GCGCGCTCGCTCGCTCACTGAGGCCGCCCGGGCAAAGCCCGGGCGTCGGGCGACCTTTGGTCGCCCGGCCTCAGT
GAGCGAGCGAGCGCGCAGAGAGGGAGTGGCCAACTCCATCACTAGGGGTTCCTCGTCTGTCTAATTCCAGCCAAG
GGCATGGGGGAAAGGACAGAGCCCAGGGACCTGTGGCCTATTCTCTGAGAGGACGCTGGGCTAATAATAGGAGGG
GAGATTAGGGAGGGATTTGACTGCATTGTTATCTCACAGGAATGGCGTTTGAGAGCCTTGCTTCCAAGCTCTTCC
AAGAGTCATGCCACCCCCCTCCAATCTCTGTGGAAGTGCCCACTGCCTTTCCCGCTTCGTTCTCTTCTCTCTAAA
TCTGAGCCCACCCCACTCAGGGGTACAGGATCTGGTTCATTTATCTCCCAGAATGATGCCTTGGGTTGCGTCCCC
TCTAAACTCTGGCACATTCCAGCCCCTCTTTGGGAGAAAGAACATCTCTTCTTGCCCAGGCCCTAGTGAGACATG
CATCGCAAGACATGCTCCCCCCTTCCTCCCCGCTGGGCTCCAGCTGCTGCCAGCCCTCCAAGAAAGGAGAGGCCC
TGAGTTGGGCTATTTTGGTATCTGGGGTGGGCACCCGCAGGGCTAAGGTTACCTTGGTATGTTAAGGGCTCCCTG
GGGCAGGACTATATAACCCCAGAGGGACTGCCCCATGCTGACTCCTTGCTTCTTTCCTGCTCGAGCCGCTGCCTT
GCCCCCCGGAGACTGAAGACACAGCCCAGGTACCTGGGCAGGTAAGTATCAAGGTTACAAGACAGGTTTAAGGAG
ACCAATAGAAACTGGGCTTGTCGAGACAGAGAAGACTCTTGCGTTTCTGATAGGCACCTATTGGTCTTACTGACA
TCCACTTTGCCTTTCTCTCCACAGGTGTCCAGACTAGTGCCACCATGCTGTGGTGGGAAGAGGTCGAGGACTGCT
ACGAGCGCGAAGATGTGCAGAAGAAAACTTTCACTAAATGGGTGAATGCCCAGTTCTCTAAGTTCGGAAAGCAGC
ACATCGAAAACCTGTTTTCCGATCTGCAAGATGGCCGGCGGCTGCTGGACCTGCTGGAGGGGCTGACCGGACAGA
AGCTGCCTAAGGAGAAAGGATCTACCAGGGTCCATGCTCTGAATAACGTGAACAAGGCTCTGAGGGTGCTGCAGA
ACAATAACGTGGACCTGGTGAACATTGGTTCCACAGACATCGTGGATGGAAACCACAAACTGACACTGGGACTGA
TCTGGAACATCATTCTGCATTGGCAAGTGAAGAACGTGATGAAGAACATCATGGCCGGACTGCAGCAGACGAACT
CCGAGAAGATCCTGCTTAGCTGGGTGAGACAGAGTACCCGGAATTACCCACAGGTGAACGTGATCAATTTCACAA
CCAGCTGGTCAGACGGCCTGGCTCTGAATGCCCTGATTCATAGCCACCGGCCAGATCTGTTTGACTGGAACTCTG
TCGTGTGTCAGCAGTCAGCCACCCAGAGGCTGGAGCACGCCTTCAATATTGCCCGCTATCAGCTGGGGATTGAGA
AACTGCTGGACCCCGAGGATGTGGACACAACATACCCTGACAAGAAGAGCATACTTATGTATATCACAAGCCTGT
TCCAGGTGCTGCCACAGCAGGTCTCCATCGAGGCCATTCAAGAAGTGGAGATGCTGCCCAGGCCTCCTAAGGTCA
CCAAAGAGGAGCACTTTCAGCTCCATCATCAGATGCACTACAGCCAGCAAATTACCGTGTCCCTGGCCCAGGGCT
ACGAGAGGACAAGTTCCCCCAAGCCTAGATTTAAGAGCTATGCCTATACCCAGGCCGCCTACGTGACTACCTCCG
ATCCCACCAGGAGCCCATTTCCCAGCCAGCACCTGGAGGCTCCCGAAGATAAGAGCTTTGGCAGCAGCCTGATGG
AATCTGAGGTGAACCTGGACAGATACCAGACTGCGCTGGAGGAGGTGCTGTCCTGGCTGCTGAGCGCCGAGGACA
CCCTGCAGGCTCAGGGCGAGATTAGTAATGATGTGGAGGTGGTGAAGGATCAGTTTCACACTCACGAAGGCTACA
TGATGGACCTGACCGCCCACCAGGGCAGGGTGGGGAACATTCTGCAGCTCGGGAGTAAGCTGATAGGGACCGGCA
AACTGTCCGAGGATGAGGAAACCGAGGTGCAGGAGCAGATGAACCTGCTTAACTCCCGGTGGGAGTGTCTGAGAG
TGGCCAGCATGGAGAAGCAGAGCAATCTGCACAGAGTGCTGATGGATCTGCAGAATCAGAAGCTGAAGGAACTGA
ATGATTGGCTCACAAAGACAGAGGAGAGGACTAGAAAGATGGAGGAGGAGCCCCTGGGCCCTGACCTGGAGGACC
TGAAGCGACAGGTGCAGCAGCACAAGGTGCTGCAGGAGGATCTGGAGCAAGAACAAGTGAGGGTGAACTCTCTGA
CTCATATGGTTGTGGTGGTGGACGAGTCTTCCGGAGACCACGCAACTGCCGCCCTCGAGGAGCAGCTGAAGGTGC
TGGGCGATAGGTGGGCTAATATCTGTAGGTGGACCGAGGACAGATGGGTGCTGCTGCAGGATATCCTGCTGAAAT
GGCAGCGCCTGACAGAAGAGCAGTGTCTGTTCAGCGCATGGCTGAGCGAAAAGGAGGACGCTGTGAACAAGATCC
ACACTACAGGATTTAAAGACCAGAACGAGATGCTGAGTAGCCTGCAGAAGCTGGCTGTGCTGAAGGCTGATTTGG
AGAAAAAGAAGCAGAGCATGGGCAAGCTGTACTCCCTGAAACAGGACCTGCTGAGCACCCTGAAGAATAAGTCCG
TGACCCAGAAAACCGAAGCTTGGCTGGACAACTTCGCGCGCTGCTGGGATAACCTGGTGCAGAAGCTGGAGAAGA
GCACCGCCCAGATTTCTCAAGCAGTGACCACAACCCAGCCCAGCCTGACCCAGACTACAGTAATGGAGACAGTCA
CTACCGTGACCACCCGGGAGCAGATCCTGGTGAAGCACGCCCAGGAAGAGCTGCCGCCCCCACCACCCCAGAAAA
AGCGGACCCTGGAGCGCCTGCAGGAGCTCCAGGAGGCCACCGACGAACTGGATCTGAAGCTGAGGCAGGCCGAGG
TGATTAAGGGATCCTGGCAGCCTGTGGGAGACCTGCTGATCGACAGCCTGCAGGATCATCTGGAGAAAGTCAAAG
CTCTGAGAGGGGAGATCGCCCCACTGAAGGAGAACGTGAGCCACGTGAATGACCTGGCTAGACAGCTGACCACCT
TGGGCATTCAGCTGAGTCCTTACAATCTGTCAACTCTGGAGGATCTGAACACCCGGTGGAAACTGCTGCAGGTGG
CTGTGGAAGATCGGGTGCGCCAGTTACATGAGGCCCACAGGGACTTTGGCCCAGCCTCACAGCACTTTCTGTCAA
CCTCTGTGCAAGGACCTTGGGAGAGAGCAATCAGCCCAAACAAGGTGCCATATTATATCAATCATGAGACTCAGA
CAACTTGCTGGGATCACCCCAAGATGACAGAACTCTATCAGTCACTCGCCGATCTCAATAATGTACGGTTCTCTG
CCTACCGGACAGCTATGAAGCTGCGGAGGCTGCAGAAGGCACTCTGTCTGGACCTGCTGAGTCTCTCTGCGGCCT
GCGATGCCCTGGATCAACATAACCTGAAGCAGAATGATCAGCCTATGGACATCCTGCAGATCATTAACTGTCTCA
CCACAATCTACGATCGGCTGGAACAGGAACATAACAACCTGGTGAATGTGCCACTGTGTGTGGACATGTGCCTGA
ATTGGCTGCTCAACGTCTACGATACAGGCAGGACTGGCAGGATCCGCGTGCTGAGCTTTAAAACCGGCATCATCT
CTCTGTGCAAAGCCCACCTGGAGGACAAATATCGGTACCTGTTTAAGCAGGTGGCCTCCAGCACAGGCTTCTGTG
ATCAGCGCCGGCTGGGCCTGCTGCTGCACGACAGCATTCAGATCCCTAGGCAGCTGGGCGAGGTGGCCTCCTTCG
GCGGCTCAAACATTGAACCCAGCGTGAGATCTTGCTTTCAGTTTGCAAATAATAAACCCGAGATCGAGGCCGCCC
TGTTCCTGGATTGGATGAGACTGGAGCCTCAGAGTATGGTGTGGCTGCCAGTGCTGCATAGAGTGGCCGCCGCTG
AGACGGCCAAGCACCAGGCAAAGTGCAATATCTGCAAGGAATGCCCCATTATTGGCTTTCGATACCGGTCCTTGA
AACACTTCAATTATGACATCTGCCAGTCATGCTTCTTCAGCGGACGCGTGGCCAAGGGACACAAGATGCATTATC
CTATGGTGGAATACTGCACTCCAACTACTTCCGGCGAGGACGTGAGAGATTTCGCTAAAGTTCTTAAAAACAAAT
TTCGGACTAAGAGGTACTTCGCCAAGCACCCCCGCATGGGCTATCTGCCTGTGCAGACAGTGCTTGAAGGAGACA
ACATGGAAACCGATACAATGTGATAGATTCTCATACAGCTAGATAACCAAAGAAGATCAGTCATACAGCTAGATA
ACCAAAGAAGACGCAGGAATAAAATATCTTTATTTTCATTACATCTGTGTGTTGGTTTTTTGTGTGAGGAACCCC
TAGTGATGGAGTTGGCCACTCCCTCTCTGCGCGCTCGCTCGCTCACTGAGGCCGGGCGACCAAAGGTCGCCCGAC
GCCCGGGCTTTGCCCGGGCGGCCTCAGTGAGCGAGCGAGCGCGC

| Nucleic acid | |
|---|---|
| cargo 17 | |
| annotated | Sequence |
| AAV2 ITR | GCGCGCTCGCTCGCTCACTGAGGCCGCCCGGGCAAAGCCCGGGCGTCGGGCGACC |
| | TTTGGTCGCCCGGCCTCAGTGAGCGAGCGAGCGCGCAGAGAGGGAGTGGCCAACT |
| | CCATCACTAGGGGTTCCT (SEQ ID NO: 2408) |
| Novel promoter | CGTCTGTCTAATTCCAGCCAAGGGCATGGGGGAAAGGACAGAGCCCAGGGACCTG |
| | TGGCCTATTCTCTGAGAGGACGCTGGGCTAATAATAGGAGGGGAGATTAGGGAGG |
| | GATTTGACTGCATTGTTATCTCACAGGAATGGCGTTTGAGAGCCTTGCTTCCAAG |
| | CTCTTCCAAGAGTCATGCCACCCCCCTCCAATCTCTGTGGAAGTGCCCACTGCCT |
| | TTCCCGCTTCGTTCTCTTCTCTCTAAATCTGAGCCCACCCCACTCAGGGGTACAG |
| | GATCTGGTTCATTTATCTCCCAGAATGATGCCTTGGGTTGCGTCCCCTCTAAACT |
| | CTGGCACATTCCAGCCCCTCTTTGGGAGAAAGAACATCTCTTCTTGCCCAGGCCC |
| | TAGTGAGACATGCATCGCAAGACATGCTCCCCCCTTCCTCCCCGCTGGGCTCCAG |
| | CTGCTGCCAGCCCTCCAAGAAAGGAGAGGCCCTGAGTTGGGCTATTTTGGTATCT |
| | GGGGTGGGCACCCGCAGGGCTAAGGTTACCTTGGTATGTTAAGGGCTCCCTGGGG |
| | CAGGACTATATAACCCCAGAGGGACTGCCCCATGCTGACTCCTTGCTTCTTTCCT |
| | GCTCGAGCCGCTGCCTTGCCCCCCGGAGACTGAAGACA (SEQ ID NO: |
| | 2403) |
| Intron | GTAAGTATCAAGGTTACAAGACAGGTTTAAGGAGACCAATAGAAACTGGGCTTGT |
| | CGAGACAGAGAAGACTCTTGCGTTTCTGATAGGCACCTATTGGTCTTACTGACAT |
| | CCACTTTGCCTTTCTCTCCACAG (SEQ ID NO: 2409) |
| Codon optimized | ATGCTGTGGTGGGAAGAGGTCGAGGACTGCTACGAGCGCGAAGATGTGCAGAAGA |
| microdystrophin | AAACTTTCACTAAATGGGTGAATGCCCAGTTCTCTAAGTTCGGAAAGCAGCACAT |
| coding sequence | CGAAAACCTGTTTTCCGATCTGCAAGATGGCCGGCGGCTGCTGGACCTGCTGGAG |
| | GGGCTGACCGGACAGAAGCTGCCTAAGGAGAAAGGATCTACCAGGGTCCATGCTC |
| | TGAATAACGTGAACAAGGCTCTGAGGGTGCTGCAGAACAATAACGTGGACCTGGT |
| | GAACATTGGTTCCACAGACATCGTGGATGGAAACCACAAACTGACACTGGGACTG |
| | ATCTGGAACATCATTCTGCATTGGCAAGTGAAGAACGTGATGAAGAACATCATGG |
| | CCGGACTGCAGCAGACGAACTCCGAGAAGATCCTGCTTAGCTGGGTGAGACAGAG |
| | TACCCGGAATTACCCACAGGTGAACGTGATCAATTTCACAACCAGCTGGTCAGAC |
| | GGCCTGGCTCTGAATGCCCTGATTCATAGCCACCGGCCAGATCTGTTTGACTGGA |
| | ACTCTGTCGTGTGTCAGCAGTCAGCCACCCAGAGGCTGGAGCACGCCTTCAATAT |
| | TGCCCGCTATCAGCTGGGGATTGAGAAACTGCTGGACCCCGAGGATGTGGACACA |
| | ACATACCCTGACAAGAAGAGCATACTTATGTATATCACAAGCCTGTTCCAGGTGC |
| | TGCCACAGCAGGTCTCCATCGAGGCCATTCAAGAAGTGGAGATGCTGCCCAGGCC |
| | TCCTAAGGTCACCAAAGAGGAGCACTTTCAGCTCCATCATCAGATGCACTACAGC |
| | CAGCAAATTACCGTGTCCCTGGCCCAGGGCTACGAGAGGACAAGTTCCCCCAAGC |
| | CTAGATTTAAGAGCTATGCCTATACCCAGGCCGCCTACGTGACTACCTCCGATCC |
| | CACCAGGAGCCCATTTCCCAGCCAGCACCTGGAGGCTCCCGAAGATAAGAGCTTT |
| | GGCAGCAGCCTGATGGAATCTGAGGTGAACCTGGACAGATACCAGACTGCGCTGG |
| | AGGAGGTGCTGTCCTGGCTGCTGAGCGCCGAGGACACCCTGCAGGCTCAGGGCGA |
| | GATTAGTAATGATGTGGAGGTGGTGAAGGATCAGTTTCACACTCACGAAGGCTAC |
| | ATGATGGACCTGACCGCCCACCAGGGCAGGGTGGGGAACATTCTGCAGCTCGGGA |
| | GTAAGCTGATAGGGACCGGCAAACTGTCCGAGGATGAGGAAACCGAGGTGCAGGA |
| | GCAGATGAACCTGCTTAACTCCCGGTGGGAGTGTCTGAGAGTGGCCAGCATGGAG |
| | AAGCAGAGCAATCTGCACAGAGTGCTGATGGATCTGCAGAATCAGAAGCTGAAGG |
| | AACTGAATGATTGGCTCACAAAGACAGAGGAGAGGACTAGAAAGATGGAGGAGGA |
| | GCCCCTGGGCCCTGACCTGGAGGACCTGAAGCGACAGGTGCAGCAGCACAAGGTG |
| | CTGCAGGAGGATCTGGAGCAAGAACAAGTGAGGGTGAACTCTCTGACTCATATGG |
| | TTGTGGTGGTGGACGAGTCTTCCGGAGACCACGCAACTGCCGCCCTCGAGGAGCA |
| | GCTGAAGGTGCTGGGCGATAGGTGGGCTAATATCTGTAGGTGGACCGAGGACAGA |
| | TGGGTGCTGCTGCAGGATATCCTGCTGAAATGGCAGCGCCTGACAGAAGAGCAGT |
| | GTCTGTTCAGCGCATGGCTGAGCGAAAAGGAGGACGCTGTGAACAAGATCCACAC |
| | TACAGGATTTAAAGACCAGAACGAGATGCTGAGTAGCCTGCAGAAGCTGGCTGTG |
| | CTGAAGGCTGATTTGGAGAAAAAGAAGCAGAGCATGGGCAAGCTGTACTCCCTGA |
| | AACAGGACCTGCTGAGCACCCTGAAGAATAAGTCCGTGACCCAGAAAACCGAAGC |
| | TTGGCTGGACAACTTCGCGCGCTGCTGGGATAACCTGGTGCAGAAGCTGGAGAAG |
| | AGCACCGCCCAGATTTCTCAAGCAGTGACCACAACCCAGCCCAGCCTGACCCAGA |
| | CTACAGTAATGGAGACAGTCACTACCGTGACCACCCGGGAGCAGATCCTGGTGAA |
| | GCACGCCCAGGAAGAGCTGCCGCCCCCACCACCCCAGAAAAAGCGGACCCTGGAG |
| | CGCCTGCAGGAGCTCCAGGAGGCCACCGACGAACTGGATCTGAAGCTGAGGCAGG |
| | CCGAGGTGATTAAGGGATCCTGGCAGCCTGTGGGAGACCTGCTGATCGACAGCCT |
| | GCAGGATCATCTGGAGAAAGTCAAAGCTCTGAGAGGGGAGATCGCCCCACTGAAG |
| | GAGAACGTGAGCCACGTGAATGACCTGGCTAGACAGCTGACCACCTTGGGCATTC |
| | AGCTGAGTCCTTACAATCTGTCAACTCTGGAGGATCTGAACACCCGGTGGAAACT |
| | GCTGCAGGTGGCTGTGGAAGATCGGGTGCGCCAGTTACATGAGGCCCACAGGGAC |
| | TTTGGCCCAGCCTCACAGCACTTTCTGTCAACCTCTGTGCAAGGACCTTGGGAGA |
| | GAGCAATCAGCCCAAACAAGGTGCCATATTATATCAATCATGAGACTCAGACAAC |
| | TTGCTGGGATCACCCCAAGATGACAGAACTCTATCAGTCACTCGCCGATCTCAAT |
| | AATGTACGGTTCTCTGCCTACCGGACAGCTATGAAGCTGCGGAGGCTGCAGAAGG |
| | CACTCTGTCTGGACCTGCTGAGTCTCTCTGCGGCCTGCGATGCCCTGGATCAACA |
| | TAACCTGAAGCAGAATGATCAGCCTATGGACATCCTGCAGATCATTAACTGTCTC |
| | ACCACAATCTACGATCGGCTGGAACAGGAACATAACAACCTGGTGAATGTGCCAC |
| | TGTGTGTGGACATGTGCCTGAATTGGCTGCTCAACGTCTACGATACAGGCAGGAC |
| | TGGCAGGATCCGCGTGCTGAGCTTTAAAACCGGCATCATCTCTCTGTGCAAAGCC |
| | CACCTGGAGGACAAATATCGGTACCTGTTTAAGCAGGTGGCCTCCAGCACAGGCT |
| | TCTGTGATCAGCGCCGGCTGGGCCTGCTGCTGCACGACAGCATTCAGATCCCTAG |
| | GCAGCTGGGCGAGGTGGCCTCCTTCGGCGGCTCAAACATTGAACCCAGCGTGAGA |
| | TCTTGCTTTCAGTTTGCAAATAATAAACCCGAGATCGAGGCCGCCCTGTTCCTGG |
| | ATTGGATGAGACTGGAGCCTCAGAGTATGGTGTGGCTGCCAGTGCTGCATAGAGT |
| | GGCCGCCGCTGAGACGGCCAAGCACCAGGCAAAGTGCAATATCTGCAAGGAATGC |
| | CCCATTATTGGCTTTCGATACCGGTCCTTGAAACACTTCAATTATGACATCTGCC |
| | AGTCATGCTTCTTCAGCGGACGCGTGGCCAAGGGACACAAGATGCATTATCCTAT |
| | GGTGGAATACTGCACTCCAACTACTTCCGGCGAGGACGTGAGAGATTTCGCTAAA |
| | GTTCTTAAAAACAAATTTCGGACTAAGAGGTACTTCGCCAAGCACCCCCGCATGG |
| | GCTATCTGCCTGTGCAGACAGTGCTTGAAGGAGACAACATGGAAACCGATACAAT |
| | GTGA (SEQ ID NO: 2406) |
| First DRG de- | TCATACAGCTAGATAACCAAAGA (SEQ ID NO: 2401) |
| targeting miRNA | |
| binding site | |
| Second DRG de- | TCATACAGCTAGATAACCAAAGA (SEQ ID NO: 2401) |
| targeting miRNA | |
| binding site | |
| Short polyA | AGGAATAAAATATCTTTATTTTCATTACATCTGTGTGTTGGTTTTTTGTGTG |
| | (SEQ ID NO: 2410) |
| AAV2 ITR | AGGAACCCCTAGTGATGGAGTTGGCCACTCCCTCTCTGCGCGCTCGCTCGCTCAC |
| | TGAGGCCGGGCGACCAAAGGTCGCCCGACGCCCGGGCTTTGCCCGGGCGGCCTCA |
| | GTGAGCGAGCGAGCGCGC (SEQ ID NO: 2411) |

Nucleic acid 18
(SEQ ID NO: 2429)
GCGCGCTCGCTCGCTCACTGAGGCCGCCCGGGCAAAGCCCGGGCGTCGGGCGACCTTTGGTCGCCCGGCCTCAGT
GAGCGAGCGAGCGCGCAGAGAGGGAGTGGCCAACTCCATCACTAGGGGTTCCTCGTCTGTCTAATTCCAGCCAAG
GGCATGGGGGAAAGGACAGAGCCCAGGGACCTGTGGCCTATTCTCTGAGAGGACGCTGGGCTAATAATAGGAGGG
GAGATTAGGGAGGGATTTGACTGCATTGTTATCTCACAGGAATGGCGTTTGAGAGCCTTGCTTCCAAGCTCTTCC
AAGAGTCATGCCACCCCCCTCCAATCTCTGTGGAAGTGCCCACTGCCTTTCCCGCTTCGTTCTCTTCTCTCGGTC
CCATCCCTGACCCACTAGCCTGGTGCCGGGGGGAGACCAATTTCTGGAGGAAGCTCTGGGTACCCAGTCTTGCCC
TAAGCCTGCCTCTGAACAGGCTGTTCTTGTTTATGACCCCCGTCCCAGCAGAATAGTGATTGCTCATCCCTGCAT
GTGATTTGAGAGGGCCAGTCTTTCAGGCCTGGAGGAAACTCAAGCCCCACCAGCCGCTTGGCATCGGAATGCTCA
GCTGGTCCCCTCCTGGGGCTCATGTGACCAAGATCTAGCTATAAATATCAGAGGGGCCTCAGACCAAGACAGAAT
TCGGGCACCAGGAGAAGGAAGCCAACAGGATCCGACCCGGTGTTTTGTGACAAAGGCAAGACCCCCAGGTCTACT
TAGAGCAACGTTAGTAGAGGACAGCCCAGGTACCTGGGCAGGTAAGTATCAAGGTTACAAGACAGGTTTAAGGAG
ACCAATAGAAACTGGGCTTGTCGAGACAGAGAAGACTCTTGCGTTTCTGATAGGCACCTATTGGTCTTACTGACA
TCCACTTTGCCTTTCTCTCCACAGGTGTCCAGACTAGTGCCACCATGCTGTGGTGGGAAGAGGTCGAGGACTGCT
ACGAGCGCGAAGATGTGCAGAAGAAAACTTTCACTAAATGGGTGAATGCCCAGTTCTCTAAGTTCGGAAAGCAGC
ACATCGAAAACCTGTTTTCCGATCTGCAAGATGGCCGGCGGCTGCTGGACCTGCTGGAGGGGCTGACCGGACAGA
AGCTGCCTAAGGAGAAAGGATCTACCAGGGTCCATGCTCTGAATAACGTGAACAAGGCTCTGAGGGTGCTGCAGA
ACAATAACGTGGACCTGGTGAACATTGGTTCCACAGACATCGTGGATGGAAACCACAAACTGACACTGGGACTGA
TCTGGAACATCATTCTGCATTGGCAAGTGAAGAACGTGATGAAGAACATCATGGCCGGACTGCAGCAGACGAACT
CCGAGAAGATCCTGCTTAGCTGGGTGAGACAGAGTACCCGGAATTACCCACAGGTGAACGTGATCAATTTCACAA
CCAGCTGGTCAGACGGCCTGGCTCTGAATGCCCTGATTCATAGCCACCGGCCAGATCTGTTTGACTGGAACTCTG
TCGTGTGTCAGCAGTCAGCCACCCAGAGGCTGGAGCACGCCTTCAATATTGCCCGCTATCAGCTGGGGATTGAGA
AACTGCTGGACCCCGAGGATGTGGACACAACATACCCTGACAAGAAGAGCATACTTATGTATATCACAAGCCTGT
TCCAGGTGCTGCCACAGCAGGTCTCCATCGAGGCCATTCAAGAAGTGGAGATGCTGCCCAGGCCTCCTAAGGTCA
CCAAAGAGGAGCACTTTCAGCTCCATCATCAGATGCACTACAGCCAGCAAATTACCGTGTCCCTGGCCCAGGGCT
ACGAGAGGACAAGTTCCCCCAAGCCTAGATTTAAGAGCTATGCCTATACCCAGGCCGCCTACGTGACTACCTCCG
ATCCCACCAGGAGCCCATTTCCCAGCCAGCACCTGGAGGCTCCCGAAGATAAGAGCTTTGGCAGCAGCCTGATGG
AATCTGAGGTGAACCTGGACAGATACCAGACTGCGCTGGAGGAGGTGCTGTCCTGGCTGCTGAGCGCCGAGGACA
CCCTGCAGGCTCAGGGCGAGATTAGTAATGATGTGGAGGTGGTGAAGGATCAGTTTCACACTCACGAAGGCTACA
TGATGGACCTGACCGCCCACCAGGGCAGGGTGGGGAACATTCTGCAGCTCGGGAGTAAGCTGATAGGGACCGGCA
AACTGTCCGAGGATGAGGAAACCGAGGTGCAGGAGCAGATGAACCTGCTTAACTCCCGGTGGGAGTGTCTGAGAG
TGGCCAGCATGGAGAAGCAGAGCAATCTGCACAGAGTGCTGATGGATCTGCAGAATCAGAAGCTGAAGGAACTGA
ATGATTGGCTCACAAAGACAGAGGAGAGGACTAGAAAGATGGAGGAGGAGCCCCTGGGCCCTGACCTGGAGGACC
TGAAGCGACAGGTGCAGCAGCACAAGGTGCTGCAGGAGGATCTGGAGCAAGAACAAGTGAGGGTGAACTCTCTGA
CTCATATGGTTGTGGTGGTGGACGAGTCTTCCGGAGACCACGCAACTGCCGCCCTCGAGGAGCAGCTGAAGGTGC
TGGGCGATAGGTGGGCTAATATCTGTAGGTGGACCGAGGACAGATGGGTGCTGCTGCAGGATATCCTGCTGAAAT
GGCAGCGCCTGACAGAAGAGCAGTGTCTGTTCAGCGCATGGCTGAGCGAAAAGGAGGACGCTGTGAACAAGATCC
ACACTACAGGATTTAAAGACCAGAACGAGATGCTGAGTAGCCTGCAGAAGCTGGCTGTGCTGAAGGCTGATTTGG
AGAAAAAGAAGCAGAGCATGGGCAAGCTGTACTCCCTGAAACAGGACCTGCTGAGCACCCTGAAGAATAAGTCCG
TGACCCAGAAAACCGAAGCTTGGCTGGACAACTTCGCGCGCTGCTGGGATAACCTGGTGCAGAAGCTGGAGAAGA
GCACCGCCCAGATTTCTCAAGCAGTGACCACAACCCAGCCCAGCCTGACCCAGACTACAGTAATGGAGACAGTCA
CTACCGTGACCACCCGGGAGCAGATCCTGGTGAAGCACGCCCAGGAAGAGCTGCCGCCCCCACCACCCCAGAAAA
AGCGGACCCTGGAGCGCCTGCAGGAGCTCCAGGAGGCCACCGACGAACTGGATCTGAAGCTGAGGCAGGCCGAGG
TGATTAAGGGATCCTGGCAGCCTGTGGGAGACCTGCTGATCGACAGCCTGCAGGATCATCTGGAGAAAGTCAAAG
CTCTGAGAGGGGAGATCGCCCCACTGAAGGAGAACGTGAGCCACGTGAATGACCTGGCTAGACAGCTGACCACCT
TGGGCATTCAGCTGAGTCCTTACAATCTGTCAACTCTGGAGGATCTGAACACCCGGTGGAAACTGCTGCAGGTGG
CTGTGGAAGATCGGGTGCGCCAGTTACATGAGGCCCACAGGGACTTTGGCCCAGCCTCACAGCACTTTCTGTCAA
CCTCTGTGCAAGGACCTTGGGAGAGAGCAATCAGCCCAAACAAGGTGCCATATTATATCAATCATGAGACTCAGA
CAACTTGCTGGGATCACCCCAAGATGACAGAACTCTATCAGTCACTCGCCGATCTCAATAATGTACGGTTCTCTG
CCTACCGGACAGCTATGAAGCTGCGGAGGCTGCAGAAGGCACTCTGTCTGGACCTGCTGAGTCTCTCTGCGGCCT
GCGATGCCCTGGATCAACATAACCTGAAGCAGAATGATCAGCCTATGGACATCCTGCAGATCATTAACTGTCTCA
CCACAATCTACGATCGGCTGGAACAGGAACATAACAACCTGGTGAATGTGCCACTGTGTGTGGACATGTGCCTGA
ATTGGCTGCTCAACGTCTACGATACAGGCAGGACTGGCAGGATCCGCGTGCTGAGCTTTAAAACCGGCATCATCT
CTCTGTGCAAAGCCCACCTGGAGGACAAATATCGGTACCTGTTTAAGCAGGTGGCCTCCAGCACAGGCTTCTGTG
ATCAGCGCCGGCTGGGCCTGCTGCTGCACGACAGCATTCAGATCCCTAGGCAGCTGGGCGAGGTGGCCTCCTTCG
GCGGCTCAAACATTGAACCCAGCGTGAGATCTTGCTTTCAGTTTGCAAATAATAAACCCGAGATCGAGGCCGCCC
TGTTCCTGGATTGGATGAGACTGGAGCCTCAGAGTATGGTGTGGCTGCCAGTGCTGCATAGAGTGGCCGCCGCTG
AGACGGCCAAGCACCAGGCAAAGTGCAATATCTGCAAGGAATGCCCCATTATTGGCTTTCGATACCGGTCCTTGA
AACACTTCAATTATGACATCTGCCAGTCATGCTTCTTCAGCGGACGCGTGGCCAAGGGACACAAGATGCATTATC
CTATGGTGGAATACTGCACTCCAACTACTTCCGGCGAGGACGTGAGAGATTTCGCTAAAGTTCTTAAAAACAAAT
TTCGGACTAAGAGGTACTTCGCCAAGCACCCCCGCATGGGCTATCTGCCTGTGCAGACAGTGCTTGAAGGAGACA
ACATGGAAACCGATACAATGTGATAGATTCTCATACAGCTAGATAACCAAAGAAGATCAGTCATACAGCTAGATA
ACCAAAGAAGACGCAGGAATAAAATATCTTTATTTTCATTACATCTGTGTGTTGGTTTTTTGTGTGAGGAACCCC
TAGTGATGGAGTTGGCCACTCCCTCTCTGCGCGCTCGCTCGCTCACTGAGGCCGGGCGACCAAAGGTCGCCCGAC
GCCCGGGCTTTGCCCGGGCGGCCTCAGTGAGCGAGCGAGCGCGC

| Nucleic acid | |
|---|---|
| cargo 18 | |
| annotated | Sequence |
| AAV2 ITR | GCGCGCTCGCTCGCTCACTGAGGCCGCCCGGGCAAAGCCCGGGCGTCGGGCGACC |
| | TTTGGTCGCCCGGCCTCAGTGAGCGAGCGAGCGCGCAGAGAGGGAGTGGCCAACT |
| | CCATCACTAGGGGTTCCT (SEQ ID NO: 2408) |
| Novel promoter | CGTCTGTCTAATTCCAGCCAAGGGCATGGGGGAAAGGACAGAGCCCAGGGACCTG |
| | TGGCCTATTCTCTGAGAGGACGCTGGGCTAATAATAGGAGGGGAGATTAGGGAGG |
| | GATTTGACTGCATTGTTATCTCACAGGAATGGCGTTTGAGAGCCTTGCTTCCAAG |
| | CTCTTCCAAGAGTCATGCCACCCCCCTCCAATCTCTGTGGAAGTGCCCACTGCCT |
| | TTCCCGCTTCGTTCTCTTCTCTCGGTCCCATCCCTGACCCACTAGCCTGGTGCCG |
| | GGGGGAGACCAATTTCTGGAGGAAGCTCTGGGTACCCAGTCTTGCCCTAAGCCTG |
| | CCTCTGAACAGGCTGTTCTTGTTTATGACCCCCGTCCCAGCAGAATAGTGATTGC |
| | TCATCCCTGCATGTGATTTGAGAGGGCCAGTCTTTCAGGCCTGGAGGAAACTCAA |
| | GCCCCACCAGCCGCTTGGCATCGGAATGCTCAGCTGGTCCCCTCCTGGGGCTCAT |
| | GTGACCAAGATCTAGCTATAAATATCAGAGGGGCCTCAGACCAAGACAGAATTCG |
| | GGCACCAGGAGAAGGAAGCCAACAGGATCCGACCCGGTGTTTTGTGACAAAGGCA |
| | AGACCCCCAGGTCTACTTAGAGCAACGTTAGTAGAGGA (SEQ ID NO: |
| | 2404) |
| Intron | GTAAGTATCAAGGTTACAAGACAGGTTTAAGGAGACCAATAGAAACTGGGCTTGT |
| | CGAGACAGAGAAGACTCTTGCGTTTCTGATAGGCACCTATTGGTCTTACTGACAT |
| | CCACTTTGCCTTTCTCTCCACAG (SEQ ID NO: 2409) |
| Codon optimized | ATGCTGTGGTGGGAAGAGGTCGAGGACTGCTACGAGCGCGAAGATGTGCAGAAGA |
| microdystrophin | AAACTTTCACTAAATGGGTGAATGCCCAGTTCTCTAAGTTCGGAAAGCAGCACAT |
| coding sequence | CGAAAACCTGTTTTCCGATCTGCAAGATGGCCGGCGGCTGCTGGACCTGCTGGAG |
| | GGGCTGACCGGACAGAAGCTGCCTAAGGAGAAAGGATCTACCAGGGTCCATGCTC |
| | TGAATAACGTGAACAAGGCTCTGAGGGTGCTGCAGAACAATAACGTGGACCTGGT |
| | GAACATTGGTTCCACAGACATCGTGGATGGAAACCACAAACTGACACTGGGACTG |
| | ATCTGGAACATCATTCTGCATTGGCAAGTGAAGAACGTGATGAAGAACATCATGG |
| | CCGGACTGCAGCAGACGAACTCCGAGAAGATCCTGCTTAGCTGGGTGAGACAGAG |
| | TACCCGGAATTACCCACAGGTGAACGTGATCAATTTCACAACCAGCTGGTCAGAC |
| | GGCCTGGCTCTGAATGCCCTGATTCATAGCCACCGGCCAGATCTGTTTGACTGGA |
| | ACTCTGTCGTGTGTCAGCAGTCAGCCACCCAGAGGCTGGAGCACGCCTTCAATAT |
| | TGCCCGCTATCAGCTGGGGATTGAGAAACTGCTGGACCCCGAGGATGTGGACACA |
| | ACATACCCTGACAAGAAGAGCATACTTATGTATATCACAAGCCTGTTCCAGGTGC |
| | TGCCACAGCAGGTCTCCATCGAGGCCATTCAAGAAGTGGAGATGCTGCCCAGGCC |
| | TCCTAAGGTCACCAAAGAGGAGCACTTTCAGCTCCATCATCAGATGCACTACAGC |
| | CAGCAAATTACCGTGTCCCTGGCCCAGGGCTACGAGAGGACAAGTTCCCCCAAGC |
| | CTAGATTTAAGAGCTATGCCTATACCCAGGCCGCCTACGTGACTACCTCCGATCC |
| | CACCAGGAGCCCATTTCCCAGCCAGCACCTGGAGGCTCCCGAAGATAAGAGCTTT |
| | GGCAGCAGCCTGATGGAATCTGAGGTGAACCTGGACAGATACCAGACTGCGCTGG |
| | AGGAGGTGCTGTCCTGGCTGCTGAGCGCCGAGGACACCCTGCAGGCTCAGGGCGA |
| | GATTAGTAATGATGTGGAGGTGGTGAAGGATCAGTTTCACACTCACGAAGGCTAC |
| | ATGATGGACCTGACCGCCCACCAGGGCAGGGTGGGGAACATTCTGCAGCTCGGGA |
| | GTAAGCTGATAGGGACCGGCAAACTGTCCGAGGATGAGGAAACCGAGGTGCAGGA |
| | GCAGATGAACCTGCTTAACTCCCGGTGGGAGTGTCTGAGAGTGGCCAGCATGGAG |
| | AAGCAGAGCAATCTGCACAGAGTGCTGATGGATCTGCAGAATCAGAAGCTGAAGG |
| | AACTGAATGATTGGCTCACAAAGACAGAGGAGAGGACTAGAAAGATGGAGGAGGA |
| | GCCCCTGGGCCCTGACCTGGAGGACCTGAAGCGACAGGTGCAGCAGCACAAGGTG |
| | CTGCAGGAGGATCTGGAGCAAGAACAAGTGAGGGTGAACTCTCTGACTCATATGG |
| | TTGTGGTGGTGGACGAGTCTTCCGGAGACCACGCAACTGCCGCCCTCGAGGAGCA |
| | GCTGAAGGTGCTGGGCGATAGGTGGGCTAATATCTGTAGGTGGACCGAGGACAGA |
| | TGGGTGCTGCTGCAGGATATCCTGCTGAAATGGCAGCGCCTGACAGAAGAGCAGT |
| | GTCTGTTCAGCGCATGGCTGAGCGAAAAGGAGGACGCTGTGAACAAGATCCACAC |
| | TACAGGATTTAAAGACCAGAACGAGATGCTGAGTAGCCTGCAGAAGCTGGCTGTG |
| | CTGAAGGCTGATTTGGAGAAAAAGAAGCAGAGCATGGGCAAGCTGTACTCCCTGA |
| | AACAGGACCTGCTGAGCACCCTGAAGAATAAGTCCGTGACCCAGAAAACCGAAGC |
| | TTGGCTGGACAACTTCGCGCGCTGCTGGGATAACCTGGTGCAGAAGCTGGAGAAG |
| | AGCACCGCCCAGATTTCTCAAGCAGTGACCACAACCCAGCCCAGCCTGACCCAGA |
| | CTACAGTAATGGAGACAGTCACTACCGTGACCACCCGGGAGCAGATCCTGGTGAA |
| | GCACGCCCAGGAAGAGCTGCCGCCCCCACCACCCCAGAAAAAGCGGACCCTGGAG |
| | CGCCTGCAGGAGCTCCAGGAGGCCACCGACGAACTGGATCTGAAGCTGAGGCAGG |
| | CCGAGGTGATTAAGGGATCCTGGCAGCCTGTGGGAGACCTGCTGATCGACAGCCT |
| | GCAGGATCATCTGGAGAAAGTCAAAGCTCTGAGAGGGGAGATCGCCCCACTGAAG |
| | GAGAACGTGAGCCACGTGAATGACCTGGCTAGACAGCTGACCACCTTGGGCATTC |
| | AGCTGAGTCCTTACAATCTGTCAACTCTGGAGGATCTGAACACCCGGTGGAAACT |
| | GCTGCAGGTGGCTGTGGAAGATCGGGTGCGCCAGTTACATGAGGCCCACAGGGAC |
| | TTTGGCCCAGCCTCACAGCACTTTCTGTCAACCTCTGTGCAAGGACCTTGGGAGA |
| | GAGCAATCAGCCCAAACAAGGTGCCATATTATATCAATCATGAGACTCAGACAAC |
| | TTGCTGGGATCACCCCAAGATGACAGAACTCTATCAGTCACTCGCCGATCTCAAT |
| | AATGTACGGTTCTCTGCCTACCGGACAGCTATGAAGCTGCGGAGGCTGCAGAAGG |
| | CACTCTGTCTGGACCTGCTGAGTCTCTCTGCGGCCTGCGATGCCCTGGATCAACA |
| | TAACCTGAAGCAGAATGATCAGCCTATGGACATCCTGCAGATCATTAACTGTCTC |
| | ACCACAATCTACGATCGGCTGGAACAGGAACATAACAACCTGGTGAATGTGCCAC |
| | TGTGTGTGGACATGTGCCTGAATTGGCTGCTCAACGTCTACGATACAGGCAGGAC |
| | TGGCAGGATCCGCGTGCTGAGCTTTAAAACCGGCATCATCTCTCTGTGCAAAGCC |
| | CACCTGGAGGACAAATATCGGTACCTGTTTAAGCAGGTGGCCTCCAGCACAGGCT |
| | TCTGTGATCAGCGCCGGCTGGGCCTGCTGCTGCACGACAGCATTCAGATCCCTAG |
| | GCAGCTGGGCGAGGTGGCCTCCTTCGGCGGCTCAAACATTGAACCCAGCGTGAGA |
| | TCTTGCTTTCAGTTTGCAAATAATAAACCCGAGATCGAGGCCGCCCTGTTCCTGG |
| | ATTGGATGAGACTGGAGCCTCAGAGTATGGTGTGGCTGCCAGTGCTGCATAGAGT |
| | GGCCGCCGCTGAGACGGCCAAGCACCAGGCAAAGTGCAATATCTGCAAGGAATGC |
| | CCCATTATTGGCTTTCGATACCGGTCCTTGAAACACTTCAATTATGACATCTGCC |
| | AGTCATGCTTCTTCAGCGGACGCGTGGCCAAGGGACACAAGATGCATTATCCTAT |
| | GGTGGAATACTGCACTCCAACTACTTCCGGCGAGGACGTGAGAGATTTCGCTAAA |
| | GTTCTTAAAAACAAATTTCGGACTAAGAGGTACTTCGCCAAGCACCCCCGCATGG |
| | GCTATCTGCCTGTGCAGACAGTGCTTGAAGGAGACAACATGGAAACCGATACAAT |
| | GTGA (SEQ ID NO: 2406) |
| First DRG de- | TCATACAGCTAGATAACCAAAGA (SEQ ID NO: 2401) |
| targeting miRNA | |
| binding site | |
| Second DRG de- | TCATACAGCTAGATAACCAAAGA (SEQ ID NO: 2401) |
| targeting miRNA | |
| binding site | |
| Short polyA | AGGAATAAAATATCTTTATTTTCATTACATCTGTGTGTTGGTTTTTTGTGTG |
| | (SEQ ID NO: 2410) |
| AAV2 ITR | AGGAACCCCTAGTGATGGAGTTGGCCACTCCCTCTCTGCGCGCTCGCTCGCTCAC |
| | TGAGGCCGGGCGACCAAAGGTCGCCCGACGCCCGGGCTTTGCCCGGGCGGCCTCA |
| | GTGAGCGAGCGAGCGCGC (SEQ ID NO: 2411) |

Nucleic acid 19
(SEQ ID NO: 2430)
GCGCGCTCGCTCGCTCACTGAGGCCGCCCGGGCAAAGCCCGGGCGTCGGGCGACCTTTGGTCGCCCGGCCTCAGT
GAGCGAGCGAGCGCGCAGAGAGGGAGTGGCCAACTCCATCACTAGGGGTTCCTTAGTTATTAATAGTAATCAATT
ACGGGGTCATTAGTTCATAGCCCATATATGGAGTTCCGCGTTACATAACTTACGGTAAATGGCCCGCCTGGCTGA
CCGCCCAACGACCCCCGCCCATTGACGTCAATAATGACGTATGTTCCCATAGTAACGCCAATAGGGACTTTCCAT
TGACGTCAATGGGTGGAGTATTTACGGTAAACTGCCCACTTGGCAGTACATCAAGTGTATCATATGCCAAGTACG
CCCCCTATTGACGTCAATGACGGTAAATGGCCCGCCTGGCATTATGCCCAGTACATGACCTTATGGGACTTTCCT
ACTTGGCAGTACATCTACGTATTAGTCATCGCTATTACCATGCTAGACTAGCATGCTGCCCATGTAAGGAGGCAA
GGCCTGGGGACACCCGAGATGCCTGGTTATAATTAACCCAGACATGTGGCTGCCCCCCCCCCCCAACACCTGCTG
CCTCTAAAAATAACCCTGCATGCCATGTTCCCGGCGAAGGGCCAGCTGTCCCCCGCCAGCTAGACTCAGCTCTCA
GGGGCCCCTCCCTGGGGACAGCCCCTCCTGGCTAGTCACACCCTGTAGGCTCCTCTATATAACCCAGGGGCACAG
GGGCTGCCCTCATTCTACCACCACCTCCACAGCACAGACAGACACTCAGGAGCCAGCCAGCCAGCCCAGGTACCT
GGGCAGGTAAGTATCAAGGTTACAAGACAGGTTTAAGGAGACCAATAGAAACTGGGCTTGTCGAGACAGAGAAGA
CTCTTGCGTTTCTGATAGGCACCTATTGGTCTTACTGACATCCACTTTGCCTTTCTCTCCACAGGTGTCCAGACT
AGTGCCACCATGCTGTGGTGGGAGGAGGTGGAGGATTGCTACGAGAGAGAGGACGTGCAGAAGAAAACCTTCACC
AAATGGGTGAACGCCCAGTTCAGCAAGTTTGGCAAGCAGCACATCGAGAACCTGTTCAGCGATCTGCAGGACGGC
CGCAGGCTGCTGGATCTGCTGGAGGGTCTGACCGGCCAGAAACTGCCCAAAGAGAAGGGATCAACCAGGGTGCAC
GCCCTGAATAATGTGAACAAGGCCCTGAGAGTGCTGCAAAATAATAATGTGGATCTGGTGAACATCGGATCTACC
GATATTGTGGACGGCAACCATAAGCTGACTCTGGGCCTGATCTGGAATATCATCCTGCACTGGCAGGTGAAAAAT
GTGATGAAAAACATCATGGCCGGGCTGCAGCAGACCAACTCTGAGAAGATCCTGCTGAGCTGGGTGAGGCAGTCT
ACAAGAAATTACCCCCAGGTGAACGTGATCAATTTCACCACCAGCTGGTCCGACGGGCTGGCTCTGAATGCCCTG
ATTCACAGCCACCGGCCCGACCTGTTCGACTGGAATTCCGTGGTGTGCCAGCAGAGCGCCACACAGAGACTGGAG
CACGCTTTCAATATCGCTCGGTATCAGCTGGGCATCGAGAAGCTGCTGGACCCCGAGGACGTGGACACTACTTAC
CCCGATAAAAAGAGCATCCTGATGTATATCACCTCCCTGTTCCAAGTGCTGCCCCAGCAGGTCTCCATCGAGGCC
ATCCAGGAGGTGGAAATGCTGCCCCGGCCCCCAAAGGTGACAAAGGAAGAACACTTCCAGCTCCACCACCAGATG
CACTACTCTCAGCAGATCACCGTGAGCCTGGCCCAGGGGTACGAGCGGACCTCTTCTCCAAAGCCCCGCTTCAAG
AGCTATGCCTATACCCAGGCCGCCTATGTGACCACCTCCGATCCCACCCGCTCACCCTTCCCTTCTCAACACCTG
GAAGCCCCAGAGGACAAGTCCTTCGGCAGTTCTCTGATGGAGTCTGAGGTGAACCTGGATAGATATCAGACTGCC
CTGGAGGAGGTGCTGTCTTGGCTGCTCTCCGCCGAGGACACCCTGCAGGCACAGGGCGAGATCTCCAACGATGTG
GAGGTGGTGAAGGACCAGTTCCACACACACGAGGGCTATATGATGGACCTGACTGCCCATCAGGGCAGAGTGGGC
AATATCCTGCAGCTGGGTTCCAAACTGATAGGCACCGGAAAGCTGAGCGAAGACGAGGAGACCGAGGTGCAGGAG
CAGATGAATCTGCTGAACTCCCGGTGGGAGTGCCTGCGAGTCGCCAGCATGGAAAAGCAGAGCAACCTGCACCGC
GTGCTCATGGATCTGCAGAATCAGAAGCTGAAGGAGCTGAATGACTGGCTGACCAAGACCGAAGAGCGCACCAGG
AAGATGGAGGAGGAGCCACTGGGCCCCGATCTGGAGGACCTGAAAAGACAGGTGCAGCAGCATAAAGTGCTGCAG
GAGGACCTGGAGCAGGAACAAGTGAGAGTGAATTCTCTGACACACATGGTGGTGGTGGTGGACGAGAGCAGCGGC
GACCACGCAACAGCCGCCCTGGAGGAGCAGCTGAAAGTGCTGGGAGACCGGTGGGCCAACATTTGCCGGTGGACC
GAGGACCGCTGGGTGCTGCTGCAGGACATTCTGCTGAAGTGGCAGCGGCTGACCGAAGAGCAGTGCCTGTTCTCC
GCCTGGCTGAGCGAGAAGGAGGACGCCGTGAATAAGATCCACACCACCGGGTTCAAGGACCAGAATGAGATGCTG
TCCAGCCTGCAGAAGCTGGCCGTGCTGAAGGCCGATCTGGAAAAGAAGAAGCAGAGCATGGGAAAGCTGTATAGC
CTGAAGCAGGACCTGCTGTCTACTCTGAAAAACAAGTCAGTGACCCAGAAGACCGAGGCCTGGCTGGACAACTTC
GCCCGCTGCTGGGACAACCTGGTGCAGAAGCTGGAAAAGAGCACCGCCCAGATCAGCCAGGCAGTGACTACCACA
CAGCCCTCCCTGACACAGACTACTGTGATGGAGACCGTGACAACAGTGACCACAAGGGAGCAGATCCTGGTGAAG
CACGCCCAGGAAGAACTGCCCCCTCCACCCCCTCAGAAGAAGAGAACTCTGGAAAGACTGCAGGAGCTGCAGGAG
GCCACTGACGAGCTGGACCTGAAGCTGCGGCAGGCCGAGGTGATTAAGGGCAGCTGGCAGCCTGTGGGCGATCTG
CTGATCGACAGCCTGCAGGACCACCTGGAGAAGGTGAAAGCCCTGCGGGGCGAGATCGCCCCTCTGAAGGAGAAC
GTCAGCCATGTGAATGACCTGGCCAGACAGCTGACCACACTGGGGATTCAGCTGTCTCCTTACAATCTGTCAACC
CTGGAGGACCTGAACACTCGCTGGAAGCTGCTGCAGGTGGCCGTGGAGGACAGGGTGCGGCAGCTGCACGAAGCC
CATCGCGACTTTGGGCCCGCCTCTCAGCACTTTCTGAGCACCTCCGTGCAGGGACCCTGGGAGCGGGCAATCAGC
CCAAACAAGGTGCCATACTACATCAACCACGAGACCCAGACCACCTGTTGGGATCACCCCAAGATGACAGAGCTG
TACCAGTCTCTGGCTGACCTGAACAACGTGCGGTTCTCAGCCTACAGGACCGCCATGAAGCTGCGGAGACTGCAG
AAGGCCCTGTGCCTGGATCTGCTGAGCCTCTCCGCTGCTTGTGACGCCCTGGATCAGCACAACCTGAAACAGAAC
GACCAGCCAATGGACATCCTGCAGATTATTAATTGCCTGACAACCATCTATGATCGGCTGGAACAGGAGCACAAT
AATCTGGTGAACGTGCCACTGTGCGTGGACATGTGCCTGAATTGGCTGCTGAACGTGTACGACACAGGACGGACC
GGCAGAATCAGAGTGCTGTCTTTTAAGACCGGGATCATCAGCCTGTGCAAAGCCCACCTGGAGGACAAGTACCGG
TATCTGTTCAAACAAGTGGCCTCCAGCACCGGCTTTTGCGACCAGCGCAGGCTGGGCCTGCTGCTCCACGACTCC
ATCCAGATCCCTAGACAGCTGGGCGAGGTGGCTTCTTTTGGCGGATCCAATATCGAGCCCAGTGTGCGGAGCTGT
TTTCAGTTTGCTAATAATAAGCCTGAGATCGAGGCCGCTCTGTTCCTGGACTGGATGAGACTGGAGCCCCAGTCC
ATGGTGTGGCTGCCAGTGCTGCACAGGGTCGCCGCCGCAGAGACTGCCAAGCACCAGGCCAAGTGCAACATCTGC
AAAGAATGCCCAATCATTGGCTTTAGATACCGGAGCCTCAAACACTTTAACTACGACATCTGCCAGAGCTGCTTC
TTCTCCGGCCGGGTGGCCAAGGGCCACAAGATGCACTACCCCATGGTGGAGTACTGTACCCCAACCACTTCCGGC
GAGGACGTGAGAGATTTCGCCAAGGTGCTGAAGAACAAGTTCCGGACAAAGAGATACTTTGCAAAACACCCAAGA
ATGGGCTACCTGCCAGTGCAGACCGTGCTGGAGGGGGACAATATGGAGACAGACACAATGTGATAGATTCCAACA
AAATCACTGATGCTGGAAGATCAGCAACAAAATCACTGATGCTGGAAGACGCAGGAATAAAATATCTTTATTTTC
ATTACATCTGTGTGTTGGTTTTTTGTGTGAGGAACCCCTAGTGATGGAGTTGGCCACTCCCTCTCTGCGCGCTCG
CTCGCTCACTGAGGCCGGGCGACCAAAGGTCGCCCGACGCCCGGGCTTTGCCCGGGCGGCCTCAGTGAGCGAGCG
AGCGCGC

| Nucleic acid | |
|---|---|
| cargo 19 | |
| annotated | Sequence |
| AAV2 ITR | GCGCGCTCGCTCGCTCACTGAGGCCGCCCGGGCAAAGCCCGGGCGTCGGGCGACCT |
| | TTGGTCGCCCGGCCTCAGTGAGCGAGCGAGCGCGCAGAGAGGGAGTGGCCAACTCC |
| | ATCACTAGGGGTTCCT (SEQ ID NO: 2408) |
| Novel promoter | TAGTTATTAATAGTAATCAATTACGGGGTCATTAGTTCATAGCCCATATATGGAGT |
| | TCCGCGTTACATAACTTACGGTAAATGGCCCGCCTGGCTGACCGCCCAACGACCCC |
| | CGCCCATTGACGTCAATAATGACGTATGTTCCCATAGTAACGCCAATAGGGACTTT |
| | CCATTGACGTCAATGGGTGGAGTATTTACGGTAAACTGCCCACTTGGCAGTACATC |
| | AAGTGTATCATATGCCAAGTACGCCCCCTATTGACGTCAATGACGGTAAATGGCCC |
| | GCCTGGCATTATGCCCAGTACATGACCTTATGGGACTTTCCTACTTGGCAGTACAT |
| | CTACGTATTAGTCATCGCTATTACCATGCTAGACTAGCATGCTGCCCATGTAAGGA |
| | GGCAAGGCCTGGGGACACCCGAGATGCCTGGTTATAATTAACCCAGACATGTGGCT |
| | GCCCCCCCCCCCCAACACCTGCTGCCTCTAAAAATAACCCTGCATGCCATGTTCCC |
| | GGCGAAGGGCCAGCTGTCCCCCGCCAGCTAGACTCAGCTCTCAGGGGCCCCTCCCT |
| | GGGGACAGCCCCTCCTGGCTAGTCACACCCTGTAGGCTCCTCTATATAACCCAGGG |
| | GCACAGGGGCTGCCCTCATTCTACCACCACCTCCACAGCACAGACAGACACTCAGG |
| | AGCCAGCCAGC (SEQ ID NO: 2402) |
| Intron | GTAAGTATCAAGGTTACAAGACAGGTTTAAGGAGACCAATAGAAACTGGGCTTGTC |
| | GAGACAGAGAAGACTCTTGCGTTTCTGATAGGCACCTATTGGTCTTACTGACATCC |
| | ACTTTGCCTTTCTCTCCACAG (SEQ ID NO: 2409) |
| Codon optimized | ATGCTGTGGTGGGAGGAGGTGGAGGATTGCTACGAGAGAGAGGACGTGCAGAAGAA |
| microdystrophin | AACCTTCACCAAATGGGTGAACGCCCAGTTCAGCAAGTTTGGCAAGCAGCACATCG |
| coding sequence | AGAACCTGTTCAGCGATCTGCAGGACGGCCGCAGGCTGCTGGATCTGCTGGAGGGT |
| | CTGACCGGCCAGAAACTGCCCAAAGAGAAGGGATCAACCAGGGTGCACGCCCTGAA |
| | TAATGTGAACAAGGCCCTGAGAGTGCTGCAAAATAATAATGTGGATCTGGTGAACA |
| | TCGGATCTACCGATATTGTGGACGGCAACCATAAGCTGACTCTGGGCCTGATCTGG |
| | AATATCATCCTGCACTGGCAGGTGAAAAATGTGATGAAAAACATCATGGCCGGGCT |
| | GCAGCAGACCAACTCTGAGAAGATCCTGCTGAGCTGGGTGAGGCAGTCTACAAGAA |
| | ATTACCCCCAGGTGAACGTGATCAATTTCACCACCAGCTGGTCCGACGGGCTGGCT |
| | CTGAATGCCCTGATTCACAGCCACCGGCCCGACCTGTTCGACTGGAATTCCGTGGT |
| | GTGCCAGCAGAGCGCCACACAGAGACTGGAGCACGCTTTCAATATCGCTCGGTATC |
| | AGCTGGGCATCGAGAAGCTGCTGGACCCCGAGGACGTGGACACTACTTACCCCGAT |
| | AAAAAGAGCATCCTGATGTATATCACCTCCCTGTTCCAAGTGCTGCCCCAGCAGGT |
| | CTCCATCGAGGCCATCCAGGAGGTGGAAATGCTGCCCCGGCCCCCAAAGGTGACAA |
| | AGGAAGAACACTTCCAGCTCCACCACCAGATGCACTACTCTCAGCAGATCACCGTG |
| | AGCCTGGCCCAGGGGTACGAGCGGACCTCTTCTCCAAAGCCCCGCTTCAAGAGCTA |
| | TGCCTATACCCAGGCCGCCTATGTGACCACCTCCGATCCCACCCGCTCACCCTTCC |
| | CTTCTCAACACCTGGAAGCCCCAGAGGACAAGTCCTTCGGCAGTTCTCTGATGGAG |
| | TCTGAGGTGAACCTGGATAGATATCAGACTGCCCTGGAGGAGGTGCTGTCTTGGCT |
| | GCTCTCCGCCGAGGACACCCTGCAGGCACAGGGCGAGATCTCCAACGATGTGGAGG |
| | TGGTGAAGGACCAGTTCCACACACACGAGGGCTATATGATGGACCTGACTGCCCAT |
| | CAGGGCAGAGTGGGCAATATCCTGCAGCTGGGTTCCAAACTGATAGGCACCGGAAA |
| | GCTGAGCGAAGACGAGGAGACCGAGGTGCAGGAGCAGATGAATCTGCTGAACTCCC |
| | GGTGGGAGTGCCTGCGAGTCGCCAGCATGGAAAAGCAGAGCAACCTGCACCGCGTG |
| | CTCATGGATCTGCAGAATCAGAAGCTGAAGGAGCTGAATGACTGGCTGACCAAGAC |
| | CGAAGAGCGCACCAGGAAGATGGAGGAGGAGCCACTGGGCCCCGATCTGGAGGACC |
| | TGAAAAGACAGGTGCAGCAGCATAAAGTGCTGCAGGAGGACCTGGAGCAGGAACAA |
| | GTGAGAGTGAATTCTCTGACACACATGGTGGTGGTGGTGGACGAGAGCAGCGGCGA |
| | CCACGCAACAGCCGCCCTGGAGGAGCAGCTGAAAGTGCTGGGAGACCGGTGGGCCA |
| | ACATTTGCCGGTGGACCGAGGACCGCTGGGTGCTGCTGCAGGACATTCTGCTGAAG |
| | TGGCAGCGGCTGACCGAAGAGCAGTGCCTGTTCTCCGCCTGGCTGAGCGAGAAGGA |
| | GGACGCCGTGAATAAGATCCACACCACCGGGTTCAAGGACCAGAATGAGATGCTGT |
| | CCAGCCTGCAGAAGCTGGCCGTGCTGAAGGCCGATCTGGAAAAGAAGAAGCAGAGC |
| | ATGGGAAAGCTGTATAGCCTGAAGCAGGACCTGCTGTCTACTCTGAAAAACAAGTC |
| | AGTGACCCAGAAGACCGAGGCCTGGCTGGACAACTTCGCCCGCTGCTGGGACAACC |
| | TGGTGCAGAAGCTGGAAAAGAGCACCGCCCAGATCAGCCAGGCAGTGACTACCACA |
| | CAGCCCTCCCTGACACAGACTACTGTGATGGAGACCGTGACAACAGTGACCACAAG |
| | GGAGCAGATCCTGGTGAAGCACGCCCAGGAAGAACTGCCCCCTCCACCCCCTCAGA |
| | AGAAGAGAACTCTGGAAAGACTGCAGGAGCTGCAGGAGGCCACTGACGAGCTGGAC |
| | CTGAAGCTGCGGCAGGCCGAGGTGATTAAGGGCAGCTGGCAGCCTGTGGGCGATCT |
| | GCTGATCGACAGCCTGCAGGACCACCTGGAGAAGGTGAAAGCCCTGCGGGGCGAGA |
| | TCGCCCCTCTGAAGGAGAACGTCAGCCATGTGAATGACCTGGCCAGACAGCTGACC |
| | ACACTGGGGATTCAGCTGTCTCCTTACAATCTGTCAACCCTGGAGGACCTGAACAC |
| | TCGCTGGAAGCTGCTGCAGGTGGCCGTGGAGGACAGGGTGCGGCAGCTGCACGAAG |
| | CCCATCGCGACTTTGGGCCCGCCTCTCAGCACTTTCTGAGCACCTCCGTGCAGGGA |
| | CCCTGGGAGCGGGCAATCAGCCCAAACAAGGTGCCATACTACATCAACCACGAGAC |
| | CCAGACCACCTGTTGGGATCACCCCAAGATGACAGAGCTGTACCAGTCTCTGGCTG |
| | ACCTGAACAACGTGCGGTTCTCAGCCTACAGGACCGCCATGAAGCTGCGGAGACTG |
| | CAGAAGGCCCTGTGCCTGGATCTGCTGAGCCTCTCCGCTGCTTGTGACGCCCTGGA |
| | TCAGCACAACCTGAAACAGAACGACCAGCCAATGGACATCCTGCAGATTATTAATT |
| | GCCTGACAACCATCTATGATCGGCTGGAACAGGAGCACAATAATCTGGTGAACGTG |
| | CCACTGTGCGTGGACATGTGCCTGAATTGGCTGCTGAACGTGTACGACACAGGACG |
| | GACCGGCAGAATCAGAGTGCTGTCTTTTAAGACCGGGATCATCAGCCTGTGCAAAG |
| | CCCACCTGGAGGACAAGTACCGGTATCTGTTCAAACAAGTGGCCTCCAGCACCGGC |
| | TTTTGCGACCAGCGCAGGCTGGGCCTGCTGCTCCACGACTCCATCCAGATCCCTAG |
| | ACAGCTGGGCGAGGTGGCTTCTTTTGGCGGATCCAATATCGAGCCCAGTGTGCGGA |
| | GCTGTTTTCAGTTTGCTAATAATAAGCCTGAGATCGAGGCCGCTCTGTTCCTGGAC |
| | TGGATGAGACTGGAGCCCCAGTCCATGGTGTGGCTGCCAGTGCTGCACAGGGTCGC |
| | CGCCGCAGAGACTGCCAAGCACCAGGCCAAGTGCAACATCTGCAAAGAATGCCCAA |
| | TCATTGGCTTTAGATACCGGAGCCTCAAACACTTTAACTACGACATCTGCCAGAGC |
| | TGCTTCTTCTCCGGCCGGGTGGCCAAGGGCCACAAGATGCACTACCCCATGGTGGA |
| | GTACTGTACCCCAACCACTTCCGGCGAGGACGTGAGAGATTTCGCCAAGGTGCTGA |
| | AGAACAAGTTCCGGACAAAGAGATACTTTGCAAAACACCCAAGAATGGGCTACCTG |
| | CCAGTGCAGACCGTGCTGGAGGGGGACAATATGGAGACAGACACAATGTGA |
| | (SEQ ID NO: 2407) |
| First DRG de- | CAACAAAATCACTGATGCTGGA (SEQ ID NO: 2399) |
| targeting miRNA | |
| binding site | |
| Second DRG de- | CAACAAAATCACTGATGCTGGA (SEQ ID NO: 2399) |
| targeting miRNA | |
| binding site | |
| Short polyA | AGGAATAAAATATCTTTATTTTCATTACATCTGTGTGTTGGTTTTTTGTGTG |
| | (SEQ ID NO: 2410) |
| AAV2 ITR | AGGAACCCCTAGTGATGGAGTTGGCCACTCCCTCTCTGCGCGCTCGCTCGCTCACT |
| | GAGGCCGGGCGACCAAAGGTCGCCCGACGCCCGGGCTTTGCCCGGGCGGCCTCAGT |
| | GAGCGAGCGAGCGCGC (SEQ ID NO: 2411) |

Nucleic acid 20
(SEQ ID NO: 2431)
GCGCGCTCGCTCGCTCACTGAGGCCGCCCGGGCAAAGCCCGGGCGTCGGGCGACCTTTGGTCGCCCGGCCTCAGT
GAGCGAGCGAGCGCGCAGAGAGGGAGTGGCCAACTCCATCACTAGGGGTTCCTCGTCTGTCTAATTCCAGCCAAG
GGCATGGGGGAAAGGACAGAGCCCAGGGACCTGTGGCCTATTCTCTGAGAGGACGCTGGGCTAATAATAGGAGGG
GAGATTAGGGAGGGATTTGACTGCATTGTTATCTCACAGGAATGGCGTTTGAGAGCCTTGCTTCCAAGCTCTTCC
AAGAGTCATGCCACCCCCCTCCAATCTCTGTGGAAGTGCCCACTGCCTTTCCCGCTTCGTTCTCTTCTCTCTAAA
TCTGAGCCCACCCCACTCAGGGGTACAGGATCTGGTTCATTTATCTCCCAGAATGATGCCTTGGGTTGCGTCCCC
TCTAAACTCTGGCACATTCCAGCCCCTCTTTGGGAGAAAGAACATCTCTTCTTGCCCAGGCCCTAGTGAGACATG
CATCGCAAGACATGCTCCCCCCTTCCTCCCCGCTGGGCTCCAGCTGCTGCCAGCCCTCCAAGAAAGGAGAGGCCC
TGAGTTGGGCTATTTTGGTATCTGGGGTGGGCACCCGCAGGGCTAAGGTTACCTTGGTATGTTAAGGGCTCCCTG
GGGCAGGACTATATAACCCCAGAGGGACTGCCCCATGCTGACTCCTTGCTTCTTTCCTGCTCGAGCCGCTGCCTT
GCCCCCCGGAGACTGAAGACACAGCCCAGGTACCTGGGCAGGTAAGTATCAAGGTTACAAGACAGGTTTAAGGAG
ACCAATAGAAACTGGGCTTGTCGAGACAGAGAAGACTCTTGCGTTTCTGATAGGCACCTATTGGTCTTACTGACA
TCCACTTTGCCTTTCTCTCCACAGGTGTCCAGACTAGTGCCACCATGCTGTGGTGGGAGGAGGTGGAGGATTGCT
ACGAGAGAGAGGACGTGCAGAAGAAAACCTTCACCAAATGGGTGAACGCCCAGTTCAGCAAGTTTGGCAAGCAGC
ACATCGAGAACCTGTTCAGCGATCTGCAGGACGGCCGCAGGCTGCTGGATCTGCTGGAGGGTCTGACCGGCCAGA
AACTGCCCAAAGAGAAGGGATCAACCAGGGTGCACGCCCTGAATAATGTGAACAAGGCCCTGAGAGTGCTGCAAA
ATAATAATGTGGATCTGGTGAACATCGGATCTACCGATATTGTGGACGGCAACCATAAGCTGACTCTGGGCCTGA
TCTGGAATATCATCCTGCACTGGCAGGTGAAAAATGTGATGAAAAACATCATGGCCGGGCTGCAGCAGACCAACT
CTGAGAAGATCCTGCTGAGCTGGGTGAGGCAGTCTACAAGAAATTACCCCCAGGTGAACGTGATCAATTTCACCA
CCAGCTGGTCCGACGGGCTGGCTCTGAATGCCCTGATTCACAGCCACCGGCCCGACCTGTTCGACTGGAATTCCG
TGGTGTGCCAGCAGAGCGCCACACAGAGACTGGAGCACGCTTTCAATATCGCTCGGTATCAGCTGGGCATCGAGA
AGCTGCTGGACCCCGAGGACGTGGACACTACTTACCCCGATAAAAAGAGCATCCTGATGTATATCACCTCCCTGT
TCCAAGTGCTGCCCCAGCAGGTCTCCATCGAGGCCATCCAGGAGGTGGAAATGCTGCCCCGGCCCCCAAAGGTGA
CAAAGGAAGAACACTTCCAGCTCCACCACCAGATGCACTACTCTCAGCAGATCACCGTGAGCCTGGCCCAGGGGT
ACGAGCGGACCTCTTCTCCAAAGCCCCGCTTCAAGAGCTATGCCTATACCCAGGCCGCCTATGTGACCACCTCCG
ATCCCACCCGCTCACCCTTCCCTTCTCAACACCTGGAAGCCCCAGAGGACAAGTCCTTCGGCAGTTCTCTGATGG
AGTCTGAGGTGAACCTGGATAGATATCAGACTGCCCTGGAGGAGGTGCTGTCTTGGCTGCTCTCCGCCGAGGACA
CCCTGCAGGCACAGGGCGAGATCTCCAACGATGTGGAGGTGGTGAAGGACCAGTTCCACACACACGAGGGCTATA
TGATGGACCTGACTGCCCATCAGGGCAGAGTGGGCAATATCCTGCAGCTGGGTTCCAAACTGATAGGCACCGGAA
AGCTGAGCGAAGACGAGGAGACCGAGGTGCAGGAGCAGATGAATCTGCTGAACTCCCGGTGGGAGTGCCTGCGAG
TCGCCAGCATGGAAAAGCAGAGCAACCTGCACCGCGTGCTCATGGATCTGCAGAATCAGAAGCTGAAGGAGCTGA
ATGACTGGCTGACCAAGACCGAAGAGCGCACCAGGAAGATGGAGGAGGAGCCACTGGGCCCCGATCTGGAGGACC
TGAAAAGACAGGTGCAGCAGCATAAAGTGCTGCAGGAGGACCTGGAGCAGGAACAAGTGAGAGTGAATTCTCTGA
CACACATGGTGGTGGTGGTGGACGAGAGCAGCGGCGACCACGCAACAGCCGCCCTGGAGGAGCAGCTGAAAGTGC
TGGGAGACCGGTGGGCCAACATTTGCCGGTGGACCGAGGACCGCTGGGTGCTGCTGCAGGACATTCTGCTGAAGT
GGCAGCGGCTGACCGAAGAGCAGTGCCTGTTCTCCGCCTGGCTGAGCGAGAAGGAGGACGCCGTGAATAAGATCC
ACACCACCGGGTTCAAGGACCAGAATGAGATGCTGTCCAGCCTGCAGAAGCTGGCCGTGCTGAAGGCCGATCTGG
AAAAGAAGAAGCAGAGCATGGGAAAGCTGTATAGCCTGAAGCAGGACCTGCTGTCTACTCTGAAAAACAAGTCAG
TGACCCAGAAGACCGAGGCCTGGCTGGACAACTTCGCCCGCTGCTGGGACAACCTGGTGCAGAAGCTGGAAAAGA
GCACCGCCCAGATCAGCCAGGCAGTGACTACCACACAGCCCTCCCTGACACAGACTACTGTGATGGAGACCGTGA
CAACAGTGACCACAAGGGAGCAGATCCTGGTGAAGCACGCCCAGGAAGAACTGCCCCCTCCACCCCCTCAGAAGA
AGAGAACTCTGGAAAGACTGCAGGAGCTGCAGGAGGCCACTGACGAGCTGGACCTGAAGCTGCGGCAGGCCGAGG
TGATTAAGGGCAGCTGGCAGCCTGTGGGCGATCTGCTGATCGACAGCCTGCAGGACCACCTGGAGAAGGTGAAAG
CCCTGCGGGGCGAGATCGCCCCTCTGAAGGAGAACGTCAGCCATGTGAATGACCTGGCCAGACAGCTGACCACAC
TGGGGATTCAGCTGTCTCCTTACAATCTGTCAACCCTGGAGGACCTGAACACTCGCTGGAAGCTGCTGCAGGTGG
CCGTGGAGGACAGGGTGCGGCAGCTGCACGAAGCCCATCGCGACTTTGGGCCCGCCTCTCAGCACTTTCTGAGCA
CCTCCGTGCAGGGACCCTGGGAGCGGGCAATCAGCCCAAACAAGGTGCCATACTACATCAACCACGAGACCCAGA
CCACCTGTTGGGATCACCCCAAGATGACAGAGCTGTACCAGTCTCTGGCTGACCTGAACAACGTGCGGTTCTCAG
CCTACAGGACCGCCATGAAGCTGCGGAGACTGCAGAAGGCCCTGTGCCTGGATCTGCTGAGCCTCTCCGCTGCTT
GTGACGCCCTGGATCAGCACAACCTGAAACAGAACGACCAGCCAATGGACATCCTGCAGATTATTAATTGCCTGA
CAACCATCTATGATCGGCTGGAACAGGAGCACAATAATCTGGTGAACGTGCCACTGTGCGTGGACATGTGCCTGA
ATTGGCTGCTGAACGTGTACGACACAGGACGGACCGGCAGAATCAGAGTGCTGTCTTTTAAGACCGGGATCATCA
GCCTGTGCAAAGCCCACCTGGAGGACAAGTACCGGTATCTGTTCAAACAAGTGGCCTCCAGCACCGGCTTTTGCG
ACCAGCGCAGGCTGGGCCTGCTGCTCCACGACTCCATCCAGATCCCTAGACAGCTGGGCGAGGTGGCTTCTTTTG
GCGGATCCAATATCGAGCCCAGTGTGCGGAGCTGTTTTCAGTTTGCTAATAATAAGCCTGAGATCGAGGCCGCTC
TGTTCCTGGACTGGATGAGACTGGAGCCCCAGTCCATGGTGTGGCTGCCAGTGCTGCACAGGGTCGCCGCCGCAG
AGACTGCCAAGCACCAGGCCAAGTGCAACATCTGCAAAGAATGCCCAATCATTGGCTTTAGATACCGGAGCCTCA
AACACTTTAACTACGACATCTGCCAGAGCTGCTTCTTCTCCGGCCGGGTGGCCAAGGGCCACAAGATGCACTACC
CCATGGTGGAGTACTGTACCCCAACCACTTCCGGCGAGGACGTGAGAGATTTCGCCAAGGTGCTGAAGAACAAGT
TCCGGACAAAGAGATACTTTGCAAAACACCCAAGAATGGGCTACCTGCCAGTGCAGACCGTGCTGGAGGGGGACA
ATATGGAGACAGACACAATGTGATAGATTCCAACAAAATCACTGATGCTGGAAGATCAGCAACAAAATCACTGAT
GCTGGAAGACGCAGGAATAAAATATCTTTATTTTCATTACATCTGTGTGTTGGTTTTTTGTGTGAGGAACCCCTA
GTGATGGAGTTGGCCACTCCCTCTCTGCGCGCTCGCTCGCTCACTGAGGCCGGGCGACCAAAGGTCGCCCGACGC
CCGGGCTTTGCCCGGGCGGCCTCAGTGAGCGAGCGAGCGCGC

| Nucleic acid | Sequence |
|---|---|
| cargo 20 | |
| annotated | |
| AAV2 ITR | GCGCGCTCGCTCGCTCACTGAGGCCGCCCGGGCAAAGCCCGGGCGTCGGGCGACC |
| | TTTGGTCGCCCGGCCTCAGTGAGCGAGCGAGCGCGCAGAGAGGGAGTGGCCAACT |
| | CCATCACTAGGGGTTCCT (SEQ ID NO: 2408) |
| Novel promoter | CGTCTGTCTAATTCCAGCCAAGGGCATGGGGGAAAGGACAGAGCCCAGGGACCTG |
| | TGGCCTATTCTCTGAGAGGACGCTGGGCTAATAATAGGAGGGGAGATTAGGGAGG |
| | GATTTGACTGCATTGTTATCTCACAGGAATGGCGTTTGAGAGCCTTGCTTCCAAG |
| | CTCTTCCAAGAGTCATGCCACCCCCCTCCAATCTCTGTGGAAGTGCCCACTGCCT |
| | TTCCCGCTTCGTTCTCTTCTCTCTAAATCTGAGCCCACCCCACTCAGGGGTACAG |
| | GATCTGGTTCATTTATCTCCCAGAATGATGCCTTGGGTTGCGTCCCCTCTAAACT |
| | CTGGCACATTCCAGCCCCTCTTTGGGAGAAAGAACATCTCTTCTTGCCCAGGCCC |
| | TAGTGAGACATGCATCGCAAGACATGCTCCCCCCTTCCTCCCCGCTGGGCTCCAG |
| | CTGCTGCCAGCCCTCCAAGAAAGGAGAGGCCCTGAGTTGGGCTATTTTGGTATCT |
| | GGGGTGGGCACCCGCAGGGCTAAGGTTACCTTGGTATGTTAAGGGCTCCCTGGGG |
| | CAGGACTATATAACCCCAGAGGGACTGCCCCATGCTGACTCCTTGCTTCTTTCCT |
| | GCTCGAGCCGCTGCCTTGCCCCCCGGAGACTGAAGACA (SEQ ID NO: |
| | 2403) |
| Intron | GTAAGTATCAAGGTTACAAGACAGGTTTAAGGAGACCAATAGAAACTGGGCTTGT |
| | CGAGACAGAGAAGACTCTTGCGTTTCTGATAGGCACCTATTGGTCTTACTGACAT |
| | CCACTTTGCCTTTCTCTCCACAG (SEQ ID NO: 2409) |
| Codon optimized | ATGCTGTGGTGGGAGGAGGTGGAGGATTGCTACGAGAGAGAGGACGTGCAGAAGA |
| microdystrophin | AAACCTTCACCAAATGGGTGAACGCCCAGTTCAGCAAGTTTGGCAAGCAGCACAT |
| coding sequence | CGAGAACCTGTTCAGCGATCTGCAGGACGGCCGCAGGCTGCTGGATCTGCTGGAG |
| | GGTCTGACCGGCCAGAAACTGCCCAAAGAGAAGGGATCAACCAGGGTGCACGCCC |
| | TGAATAATGTGAACAAGGCCCTGAGAGTGCTGCAAAATAATAATGTGGATCTGGT |
| | GAACATCGGATCTACCGATATTGTGGACGGCAACCATAAGCTGACTCTGGGCCTG |
| | ATCTGGAATATCATCCTGCACTGGCAGGTGAAAAATGTGATGAAAAACATCATGG |
| | CCGGGCTGCAGCAGACCAACTCTGAGAAGATCCTGCTGAGCTGGGTGAGGCAGTC |
| | TACAAGAAATTACCCCCAGGTGAACGTGATCAATTTCACCACCAGCTGGTCCGAC |
| | GGGCTGGCTCTGAATGCCCTGATTCACAGCCACCGGCCCGACCTGTTCGACTGGA |
| | ATTCCGTGGTGTGCCAGCAGAGCGCCACACAGAGACTGGAGCACGCTTTCAATAT |
| | CGCTCGGTATCAGCTGGGCATCGAGAAGCTGCTGGACCCCGAGGACGTGGACACT |
| | ACTTACCCCGATAAAAAGAGCATCCTGATGTATATCACCTCCCTGTTCCAAGTGC |
| | TGCCCCAGCAGGTCTCCATCGAGGCCATCCAGGAGGTGGAAATGCTGCCCCGGCC |
| | CCCAAAGGTGACAAAGGAAGAACACTTCCAGCTCCACCACCAGATGCACTACTCT |
| | CAGCAGATCACCGTGAGCCTGGCCCAGGGGTACGAGCGGACCTCTTCTCCAAAGC |
| | CCCGCTTCAAGAGCTATGCCTATACCCAGGCCGCCTATGTGACCACCTCCGATCC |
| | CACCCGCTCACCCTTCCCTTCTCAACACCTGGAAGCCCCAGAGGACAAGTCCTTC |
| | GGCAGTTCTCTGATGGAGTCTGAGGTGAACCTGGATAGATATCAGACTGCCCTGG |
| | AGGAGGTGCTGTCTTGGCTGCTCTCCGCCGAGGACACCCTGCAGGCACAGGGCGA |
| | GATCTCCAACGATGTGGAGGTGGTGAAGGACCAGTTCCACACACACGAGGGCTAT |
| | ATGATGGACCTGACTGCCCATCAGGGCAGAGTGGGCAATATCCTGCAGCTGGGTT |
| | CCAAACTGATAGGCACCGGAAAGCTGAGCGAAGACGAGGAGACCGAGGTGCAGGA |
| | GCAGATGAATCTGCTGAACTCCCGGTGGGAGTGCCTGCGAGTCGCCAGCATGGAA |
| | AAGCAGAGCAACCTGCACCGCGTGCTCATGGATCTGCAGAATCAGAAGCTGAAGG |
| | AGCTGAATGACTGGCTGACCAAGACCGAAGAGCGCACCAGGAAGATGGAGGAGGA |
| | GCCACTGGGCCCCGATCTGGAGGACCTGAAAAGACAGGTGCAGCAGCATAAAGTG |
| | CTGCAGGAGGACCTGGAGCAGGAACAAGTGAGAGTGAATTCTCTGACACACATGG |
| | TGGTGGTGGTGGACGAGAGCAGCGGCGACCACGCAACAGCCGCCCTGGAGGAGCA |
| | GCTGAAAGTGCTGGGAGACCGGTGGGCCAACATTTGCCGGTGGACCGAGGACCGC |
| | TGGGTGCTGCTGCAGGACATTCTGCTGAAGTGGCAGCGGCTGACCGAAGAGCAGT |
| | GCCTGTTCTCCGCCTGGCTGAGCGAGAAGGAGGACGCCGTGAATAAGATCCACAC |
| | CACCGGGTTCAAGGACCAGAATGAGATGCTGTCCAGCCTGCAGAAGCTGGCCGTG |
| | CTGAAGGCCGATCTGGAAAAGAAGAAGCAGAGCATGGGAAAGCTGTATAGCCTGA |
| | AGCAGGACCTGCTGTCTACTCTGAAAAACAAGTCAGTGACCCAGAAGACCGAGGC |
| | CTGGCTGGACAACTTCGCCCGCTGCTGGGACAACCTGGTGCAGAAGCTGGAAAAG |
| | AGCACCGCCCAGATCAGCCAGGCAGTGACTACCACACAGCCCTCCCTGACACAGA |
| | CTACTGTGATGGAGACCGTGACAACAGTGACCACAAGGGAGCAGATCCTGGTGAA |
| | GCACGCCCAGGAAGAACTGCCCCCTCCACCCCCTCAGAAGAAGAGAACTCTGGAA |
| | AGACTGCAGGAGCTGCAGGAGGCCACTGACGAGCTGGACCTGAAGCTGCGGCAGG |
| | CCGAGGTGATTAAGGGCAGCTGGCAGCCTGTGGGCGATCTGCTGATCGACAGCCT |
| | GCAGGACCACCTGGAGAAGGTGAAAGCCCTGCGGGGCGAGATCGCCCCTCTGAAG |
| | GAGAACGTCAGCCATGTGAATGACCTGGCCAGACAGCTGACCACACTGGGGATTC |
| | AGCTGTCTCCTTACAATCTGTCAACCCTGGAGGACCTGAACACTCGCTGGAAGCT |
| | GCTGCAGGTGGCCGTGGAGGACAGGGTGCGGCAGCTGCACGAAGCCCATCGCGAC |
| | TTTGGGCCCGCCTCTCAGCACTTTCTGAGCACCTCCGTGCAGGGACCCTGGGAGC |
| | GGGCAATCAGCCCAAACAAGGTGCCATACTACATCAACCACGAGACCCAGACCAC |
| | CTGTTGGGATCACCCCAAGATGACAGAGCTGTACCAGTCTCTGGCTGACCTGAAC |
| | AACGTGCGGTTCTCAGCCTACAGGACCGCCATGAAGCTGCGGAGACTGCAGAAGG |
| | CCCTGTGCCTGGATCTGCTGAGCCTCTCCGCTGCTTGTGACGCCCTGGATCAGCA |
| | CAACCTGAAACAGAACGACCAGCCAATGGACATCCTGCAGATTATTAATTGCCTG |
| | ACAACCATCTATGATCGGCTGGAACAGGAGCACAATAATCTGGTGAACGTGCCAC |
| | TGTGCGTGGACATGTGCCTGAATTGGCTGCTGAACGTGTACGACACAGGACGGAC |
| | CGGCAGAATCAGAGTGCTGTCTTTTAAGACCGGGATCATCAGCCTGTGCAAAGCC |
| | CACCTGGAGGACAAGTACCGGTATCTGTTCAAACAAGTGGCCTCCAGCACCGGCT |
| | TTTGCGACCAGCGCAGGCTGGGCCTGCTGCTCCACGACTCCATCCAGATCCCTAG |
| | ACAGCTGGGCGAGGTGGCTTCTTTTGGCGGATCCAATATCGAGCCCAGTGTGCGG |
| | AGCTGTTTTCAGTTTGCTAATAATAAGCCTGAGATCGAGGCCGCTCTGTTCCTGG |
| | ACTGGATGAGACTGGAGCCCCAGTCCATGGTGTGGCTGCCAGTGCTGCACAGGGT |
| | CGCCGCCGCAGAGACTGCCAAGCACCAGGCCAAGTGCAACATCTGCAAAGAATGC |
| | CCAATCATTGGCTTTAGATACCGGAGCCTCAAACACTTTAACTACGACATCTGCC |
| | AGAGCTGCTTCTTCTCCGGCCGGGTGGCCAAGGGCCACAAGATGCACTACCCCAT |
| | GGTGGAGTACTGTACCCCAACCACTTCCGGCGAGGACGTGAGAGATTTCGCCAAG |
| | GTGCTGAAGAACAAGTTCCGGACAAAGAGATACTTTGCAAAACACCCAAGAATGG |
| | GCTACCTGCCAGTGCAGACCGTGCTGGAGGGGGACAATATGGAGACAGACACAAT |
| | GTGA |
| | (SEQ ID NO: 2407) |
| First DRG de- | CAACAAAATCACTGATGCTGGA (SEQ ID NO: 2399) |
| targeting miRNA | |
| binding site | |
| Second DRG de- | CAACAAAATCACTGATGCTGGA (SEQ ID NO: 2399) |
| targeting miRNA | |
| binding site | |
| Short polyA | AGGAATAAAATATCTTTATTTTCATTACATCTGTGTGTTGGTTTTTTGTGTG |
| | (SEQ ID NO: 2410) |
| AAV2 ITR | AGGAACCCCTAGTGATGGAGTTGGCCACTCCCTCTCTGCGCGCTCGCTCGCTCAC |
| | TGAGGCCGGGCGACCAAAGGTCGCCCGACGCCCGGGCTTTGCCCGGGCGGCCTCA |
| | GTGAGCGAGCGAGCGCGC (SEQ ID NO: 2411) |

Nucleic acid 21
(SEQ ID NO: 2432)
GCGCGCTCGCTCGCTCACTGAGGCCGCCCGGGCAAAGCCCGGGCGTCGGGCGACCTTTGGTCGCCCGGCCTCAGT
GAGCGAGCGAGCGCGCAGAGAGGGAGTGGCCAACTCCATCACTAGGGGTTCCTCGTCTGTCTAATTCCAGCCAAG
GGCATGGGGGAAAGGACAGAGCCCAGGGACCTGTGGCCTATTCTCTGAGAGGACGCTGGGCTAATAATAGGAGGG
GAGATTAGGGAGGGATTTGACTGCATTGTTATCTCACAGGAATGGCGTTTGAGAGCCTTGCTTCCAAGCTCTTCC
AAGAGTCATGCCACCCCCCTCCAATCTCTGTGGAAGTGCCCACTGCCTTTCCCGCTTCGTTCTCTTCTCTCGGTC
CCATCCCTGACCCACTAGCCTGGTGCCGGGGGGAGACCAATTTCTGGAGGAAGCTCTGGGTACCCAGTCTTGCCC
TAAGCCTGCCTCTGAACAGGCTGTTCTTGTTTATGACCCCCGTCCCAGCAGAATAGTGATTGCTCATCCCTGCAT
GTGATTTGAGAGGGCCAGTCTTTCAGGCCTGGAGGAAACTCAAGCCCCACCAGCCGCTTGGCATCGGAATGCTCA
GCTGGTCCCCTCCTGGGGCTCATGTGACCAAGATCTAGCTATAAATATCAGAGGGGCCTCAGACCAAGACAGAAT
TCGGGCACCAGGAGAAGGAAGCCAACAGGATCCGACCCGGTGTTTTGTGACAAAGGCAAGACCCCCAGGTCTACT
TAGAGCAACGTTAGTAGAGGACAGCCCAGGTACCTGGGCAGGTAAGTATCAAGGTTACAAGACAGGTTTAAGGAG
ACCAATAGAAACTGGGCTTGTCGAGACAGAGAAGACTCTTGCGTTTCTGATAGGCACCTATTGGTCTTACTGACA
TCCACTTTGCCTTTCTCTCCACAGGTGTCCAGACTAGTGCCACCATGCTGTGGTGGGAGGAGGTGGAGGATTGCT
ACGAGAGAGAGGACGTGCAGAAGAAAACCTTCACCAAATGGGTGAACGCCCAGTTCAGCAAGTTTGGCAAGCAGC
ACATCGAGAACCTGTTCAGCGATCTGCAGGACGGCCGCAGGCTGCTGGATCTGCTGGAGGGTCTGACCGGCCAGA
AACTGCCCAAAGAGAAGGGATCAACCAGGGTGCACGCCCTGAATAATGTGAACAAGGCCCTGAGAGTGCTGCAAA
ATAATAATGTGGATCTGGTGAACATCGGATCTACCGATATTGTGGACGGCAACCATAAGCTGACTCTGGGCCTGA
TCTGGAATATCATCCTGCACTGGCAGGTGAAAAATGTGATGAAAAACATCATGGCCGGGCTGCAGCAGACCAACT
CTGAGAAGATCCTGCTGAGCTGGGTGAGGCAGTCTACAAGAAATTACCCCCAGGTGAACGTGATCAATTTCACCA
CCAGCTGGTCCGACGGGCTGGCTCTGAATGCCCTGATTCACAGCCACCGGCCCGACCTGTTCGACTGGAATTCCG
TGGTGTGCCAGCAGAGCGCCACACAGAGACTGGAGCACGCTTTCAATATCGCTCGGTATCAGCTGGGCATCGAGA
AGCTGCTGGACCCCGAGGACGTGGACACTACTTACCCCGATAAAAAGAGCATCCTGATGTATATCACCTCCCTGT
TCCAAGTGCTGCCCCAGCAGGTCTCCATCGAGGCCATCCAGGAGGTGGAAATGCTGCCCCGGCCCCCAAAGGTGA
CAAAGGAAGAACACTTCCAGCTCCACCACCAGATGCACTACTCTCAGCAGATCACCGTGAGCCTGGCCCAGGGGT
ACGAGCGGACCTCTTCTCCAAAGCCCCGCTTCAAGAGCTATGCCTATACCCAGGCCGCCTATGTGACCACCTCCG
ATCCCACCCGCTCACCCTTCCCTTCTCAACACCTGGAAGCCCCAGAGGACAAGTCCTTCGGCAGTTCTCTGATGG
AGTCTGAGGTGAACCTGGATAGATATCAGACTGCCCTGGAGGAGGTGCTGTCTTGGCTGCTCTCCGCCGAGGACA
CCCTGCAGGCACAGGGCGAGATCTCCAACGATGTGGAGGTGGTGAAGGACCAGTTCCACACACACGAGGGCTATA
TGATGGACCTGACTGCCCATCAGGGCAGAGTGGGCAATATCCTGCAGCTGGGTTCCAAACTGATAGGCACCGGAA
AGCTGAGCGAAGACGAGGAGACCGAGGTGCAGGAGCAGATGAATCTGCTGAACTCCCGGTGGGAGTGCCTGCGAG
TCGCCAGCATGGAAAAGCAGAGCAACCTGCACCGCGTGCTCATGGATCTGCAGAATCAGAAGCTGAAGGAGCTGA
ATGACTGGCTGACCAAGACCGAAGAGCGCACCAGGAAGATGGAGGAGGAGCCACTGGGCCCCGATCTGGAGGACC
TGAAAAGACAGGTGCAGCAGCATAAAGTGCTGCAGGAGGACCTGGAGCAGGAACAAGTGAGAGTGAATTCTCTGA
CACACATGGTGGTGGTGGTGGACGAGAGCAGCGGCGACCACGCAACAGCCGCCCTGGAGGAGCAGCTGAAAGTGC
TGGGAGACCGGTGGGCCAACATTTGCCGGTGGACCGAGGACCGCTGGGTGCTGCTGCAGGACATTCTGCTGAAGT
GGCAGCGGCTGACCGAAGAGCAGTGCCTGTTCTCCGCCTGGCTGAGCGAGAAGGAGGACGCCGTGAATAAGATCC
ACACCACCGGGTTCAAGGACCAGAATGAGATGCTGTCCAGCCTGCAGAAGCTGGCCGTGCTGAAGGCCGATCTGG
AAAAGAAGAAGCAGAGCATGGGAAAGCTGTATAGCCTGAAGCAGGACCTGCTGTCTACTCTGAAAAACAAGTCAG
TGACCCAGAAGACCGAGGCCTGGCTGGACAACTTCGCCCGCTGCTGGGACAACCTGGTGCAGAAGCTGGAAAAGA
GCACCGCCCAGATCAGCCAGGCAGTGACTACCACACAGCCCTCCCTGACACAGACTACTGTGATGGAGACCGTGA
CAACAGTGACCACAAGGGAGCAGATCCTGGTGAAGCACGCCCAGGAAGAACTGCCCCCTCCACCCCCTCAGAAGA
AGAGAACTCTGGAAAGACTGCAGGAGCTGCAGGAGGCCACTGACGAGCTGGACCTGAAGCTGCGGCAGGCCGAGG
TGATTAAGGGCAGCTGGCAGCCTGTGGGCGATCTGCTGATCGACAGCCTGCAGGACCACCTGGAGAAGGTGAAAG
CCCTGCGGGGCGAGATCGCCCCTCTGAAGGAGAACGTCAGCCATGTGAATGACCTGGCCAGACAGCTGACCACAC
TGGGGATTCAGCTGTCTCCTTACAATCTGTCAACCCTGGAGGACCTGAACACTCGCTGGAAGCTGCTGCAGGTGG
CCGTGGAGGACAGGGTGCGGCAGCTGCACGAAGCCCATCGCGACTTTGGGCCCGCCTCTCAGCACTTTCTGAGCA
CCTCCGTGCAGGGACCCTGGGAGCGGGCAATCAGCCCAAACAAGGTGCCATACTACATCAACCACGAGACCCAGA
CCACCTGTTGGGATCACCCCAAGATGACAGAGCTGTACCAGTCTCTGGCTGACCTGAACAACGTGCGGTTCTCAG
CCTACAGGACCGCCATGAAGCTGCGGAGACTGCAGAAGGCCCTGTGCCTGGATCTGCTGAGCCTCTCCGCTGCTT
GTGACGCCCTGGATCAGCACAACCTGAAACAGAACGACCAGCCAATGGACATCCTGCAGATTATTAATTGCCTGA
CAACCATCTATGATCGGCTGGAACAGGAGCACAATAATCTGGTGAACGTGCCACTGTGCGTGGACATGTGCCTGA
ATTGGCTGCTGAACGTGTACGACACAGGACGGACCGGCAGAATCAGAGTGCTGTCTTTTAAGACCGGGATCATCA
GCCTGTGCAAAGCCCACCTGGAGGACAAGTACCGGTATCTGTTCAAACAAGTGGCCTCCAGCACCGGCTTTTGCG
ACCAGCGCAGGCTGGGCCTGCTGCTCCACGACTCCATCCAGATCCCTAGACAGCTGGGCGAGGTGGCTTCTTTTG
GCGGATCCAATATCGAGCCCAGTGTGCGGAGCTGTTTTCAGTTTGCTAATAATAAGCCTGAGATCGAGGCCGCTC
TGTTCCTGGACTGGATGAGACTGGAGCCCCAGTCCATGGTGTGGCTGCCAGTGCTGCACAGGGTCGCCGCCGCAG
AGACTGCCAAGCACCAGGCCAAGTGCAACATCTGCAAAGAATGCCCAATCATTGGCTTTAGATACCGGAGCCTCA
AACACTTTAACTACGACATCTGCCAGAGCTGCTTCTTCTCCGGCCGGGTGGCCAAGGGCCACAAGATGCACTACC
CCATGGTGGAGTACTGTACCCCAACCACTTCCGGCGAGGACGTGAGAGATTTCGCCAAGGTGCTGAAGAACAAGT
TCCGGACAAAGAGATACTTTGCAAAACACCCAAGAATGGGCTACCTGCCAGTGCAGACCGTGCTGGAGGGGGACA
ATATGGAGACAGACACAATGTGATAGATTCCAACAAAATCACTGATGCTGGAAGATCAGCAACAAAATCACTGAT
GCTGGAAGACGCAGGAATAAAATATCTTTATTTTCATTACATCTGTGTGTTGGTTTTTTGTGTGAGGAACCCCTA
GTGATGGAGTTGGCCACTCCCTCTCTGCGCGCTCGCTCGCTCACTGAGGCCGGGCGACCAAAGGTCGCCCGACGC
CCGGGCTTTGCCCGGGCGGCCTCAGTGAGCGAGCGAGCGCGC

| Nucleic acid | |
|---|---|
| cargo 21 | |
| annotated | Sequence |
| AAV2 ITR | GCGCGCTCGCTCGCTCACTGAGGCCGCCCGGGCAAAGCCCGGGCGTCGGGCGACCT |
| | TTGGTCGCCCGGCCTCAGTGAGCGAGCGAGCGCGCAGAGAGGGAGTGGCCAACTCC |
| | ATCACTAGGGGTTCCT (SEQ ID NO: 2408) |
| Novel promoter | CGTCTGTCTAATTCCAGCCAAGGGCATGGGGGAAAGGACAGAGCCCAGGGACCTGT |
| | GGCCTATTCTCTGAGAGGACGCTGGGCTAATAATAGGAGGGGAGATTAGGGAGGGA |
| | TTTGACTGCATTGTTATCTCACAGGAATGGCGTTTGAGAGCCTTGCTTCCAAGCTC |
| | TTCCAAGAGTCATGCCACCCCCCTCCAATCTCTGTGGAAGTGCCCACTGCCTTTCC |
| | CGCTTCGTTCTCTTCTCTCGGTCCCATCCCTGACCCACTAGCCTGGTGCCGGGGGG |
| | AGACCAATTTCTGGAGGAAGCTCTGGGTACCCAGTCTTGCCCTAAGCCTGCCTCTG |
| | AACAGGCTGTTCTTGTTTATGACCCCCGTCCCAGCAGAATAGTGATTGCTCATCCC |
| | TGCATGTGATTTGAGAGGGCCAGTCTTTCAGGCCTGGAGGAAACTCAAGCCCCACC |
| | AGCCGCTTGGCATCGGAATGCTCAGCTGGTCCCCTCCTGGGGCTCATGTGACCAAG |
| | ATCTAGCTATAAATATCAGAGGGGCCTCAGACCAAGACAGAATTCGGGCACCAGGA |
| | GAAGGAAGCCAACAGGATCCGACCCGGTGTTTTGTGACAAAGGCAAGACCCCCAGG |
| | TCTACTTAGAGCAACGTTAGTAGAGGA (SEQ ID NO: 2404) |
| Intron | GTAAGTATCAAGGTTACAAGACAGGTTTAAGGAGACCAATAGAAACTGGGCTTGTC |
| | GAGACAGAGAAGACTCTTGCGTTTCTGATAGGCACCTATTGGTCTTACTGACATCC |
| | ACTTTGCCTTTCTCTCCACAG (SEQ ID NO: 2409) |
| Codon optimized | ATGCTGTGGTGGGAGGAGGTGGAGGATTGCTACGAGAGAGAGGACGTGCAGAAGAA |
| microdystrophin | AACCTTCACCAAATGGGTGAACGCCCAGTTCAGCAAGTTTGGCAAGCAGCACATCG |
| coding sequence | AGAACCTGTTCAGCGATCTGCAGGACGGCCGCAGGCTGCTGGATCTGCTGGAGGGT |
| | CTGACCGGCCAGAAACTGCCCAAAGAGAAGGGATCAACCAGGGTGCACGCCCTGAA |
| | TAATGTGAACAAGGCCCTGAGAGTGCTGCAAAATAATAATGTGGATCTGGTGAACA |
| | TCGGATCTACCGATATTGTGGACGGCAACCATAAGCTGACTCTGGGCCTGATCTGG |
| | AATATCATCCTGCACTGGCAGGTGAAAAATGTGATGAAAAACATCATGGCCGGGCT |
| | GCAGCAGACCAACTCTGAGAAGATCCTGCTGAGCTGGGTGAGGCAGTCTACAAGAA |
| | ATTACCCCCAGGTGAACGTGATCAATTTCACCACCAGCTGGTCCGACGGGCTGGCT |
| | CTGAATGCCCTGATTCACAGCCACCGGCCCGACCTGTTCGACTGGAATTCCGTGGT |
| | GTGCCAGCAGAGCGCCACACAGAGACTGGAGCACGCTTTCAATATCGCTCGGTATC |
| | AGCTGGGCATCGAGAAGCTGCTGGACCCCGAGGACGTGGACACTACTTACCCCGAT |
| | AAAAAGAGCATCCTGATGTATATCACCTCCCTGTTCCAAGTGCTGCCCCAGCAGGT |
| | CTCCATCGAGGCCATCCAGGAGGTGGAAATGCTGCCCCGGCCCCCAAAGGTGACAA |
| | AGGAAGAACACTTCCAGCTCCACCACCAGATGCACTACTCTCAGCAGATCACCGTG |
| | AGCCTGGCCCAGGGGTACGAGCGGACCTCTTCTCCAAAGCCCCGCTTCAAGAGCTA |
| | TGCCTATACCCAGGCCGCCTATGTGACCACCTCCGATCCCACCCGCTCACCCTTCC |
| | CTTCTCAACACCTGGAAGCCCCAGAGGACAAGTCCTTCGGCAGTTCTCTGATGGAG |
| | TCTGAGGTGAACCTGGATAGATATCAGACTGCCCTGGAGGAGGTGCTGTCTTGGCT |
| | GCTCTCCGCCGAGGACACCCTGCAGGCACAGGGCGAGATCTCCAACGATGTGGAGG |
| | TGGTGAAGGACCAGTTCCACACACACGAGGGCTATATGATGGACCTGACTGCCCAT |
| | CAGGGCAGAGTGGGCAATATCCTGCAGCTGGGTTCCAAACTGATAGGCACCGGAAA |
| | GCTGAGCGAAGACGAGGAGACCGAGGTGCAGGAGCAGATGAATCTGCTGAACTCCC |
| | GGTGGGAGTGCCTGCGAGTCGCCAGCATGGAAAAGCAGAGCAACCTGCACCGCGTG |
| | CTCATGGATCTGCAGAATCAGAAGCTGAAGGAGCTGAATGACTGGCTGACCAAGAC |
| | CGAAGAGCGCACCAGGAAGATGGAGGAGGAGCCACTGGGCCCCGATCTGGAGGACC |
| | TGAAAAGACAGGTGCAGCAGCATAAAGTGCTGCAGGAGGACCTGGAGCAGGAACAA |
| | GTGAGAGTGAATTCTCTGACACACATGGTGGTGGTGGTGGACGAGAGCAGCGGCGA |
| | CCACGCAACAGCCGCCCTGGAGGAGCAGCTGAAAGTGCTGGGAGACCGGTGGGCCA |
| | ACATTTGCCGGTGGACCGAGGACCGCTGGGTGCTGCTGCAGGACATTCTGCTGAAG |
| | TGGCAGCGGCTGACCGAAGAGCAGTGCCTGTTCTCCGCCTGGCTGAGCGAGAAGGA |
| | GGACGCCGTGAATAAGATCCACACCACCGGGTTCAAGGACCAGAATGAGATGCTGT |
| | CCAGCCTGCAGAAGCTGGCCGTGCTGAAGGCCGATCTGGAAAAGAAGAAGCAGAGC |
| | ATGGGAAAGCTGTATAGCCTGAAGCAGGACCTGCTGTCTACTCTGAAAAACAAGTC |
| | AGTGACCCAGAAGACCGAGGCCTGGCTGGACAACTTCGCCCGCTGCTGGGACAACC |
| | TGGTGCAGAAGCTGGAAAAGAGCACCGCCCAGATCAGCCAGGCAGTGACTACCACA |
| | CAGCCCTCCCTGACACAGACTACTGTGATGGAGACCGTGACAACAGTGACCACAAG |
| | GGAGCAGATCCTGGTGAAGCACGCCCAGGAAGAACTGCCCCCTCCACCCCCTCAGA |
| | AGAAGAGAACTCTGGAAAGACTGCAGGAGCTGCAGGAGGCCACTGACGAGCTGGAC |
| | CTGAAGCTGCGGCAGGCCGAGGTGATTAAGGGCAGCTGGCAGCCTGTGGGCGATCT |
| | GCTGATCGACAGCCTGCAGGACCACCTGGAGAAGGTGAAAGCCCTGCGGGGCGAGA |
| | TCGCCCCTCTGAAGGAGAACGTCAGCCATGTGAATGACCTGGCCAGACAGCTGACC |
| | ACACTGGGGATTCAGCTGTCTCCTTACAATCTGTCAACCCTGGAGGACCTGAACAC |
| | TCGCTGGAAGCTGCTGCAGGTGGCCGTGGAGGACAGGGTGCGGCAGCTGCACGAAG |
| | CCCATCGCGACTTTGGGCCCGCCTCTCAGCACTTTCTGAGCACCTCCGTGCAGGGA |
| | CCCTGGGAGCGGGCAATCAGCCCAAACAAGGTGCCATACTACATCAACCACGAGAC |
| | CCAGACCACCTGTTGGGATCACCCCAAGATGACAGAGCTGTACCAGTCTCTGGCTG |
| | ACCTGAACAACGTGCGGTTCTCAGCCTACAGGACCGCCATGAAGCTGCGGAGACTG |
| | CAGAAGGCCCTGTGCCTGGATCTGCTGAGCCTCTCCGCTGCTTGTGACGCCCTGGA |
| | TCAGCACAACCTGAAACAGAACGACCAGCCAATGGACATCCTGCAGATTATTAATT |
| | GCCTGACAACCATCTATGATCGGCTGGAACAGGAGCACAATAATCTGGTGAACGTG |
| | CCACTGTGCGTGGACATGTGCCTGAATTGGCTGCTGAACGTGTACGACACAGGACG |
| | GACCGGCAGAATCAGAGTGCTGTCTTTTAAGACCGGGATCATCAGCCTGTGCAAAG |
| | CCCACCTGGAGGACAAGTACCGGTATCTGTTCAAACAAGTGGCCTCCAGCACCGGC |
| | TTTTGCGACCAGCGCAGGCTGGGCCTGCTGCTCCACGACTCCATCCAGATCCCTAG |
| | ACAGCTGGGCGAGGTGGCTTCTTTTGGCGGATCCAATATCGAGCCCAGTGTGCGGA |
| | GCTGTTTTCAGTTTGCTAATAATAAGCCTGAGATCGAGGCCGCTCTGTTCCTGGAC |
| | TGGATGAGACTGGAGCCCCAGTCCATGGTGTGGCTGCCAGTGCTGCACAGGGTCGC |
| | CGCCGCAGAGACTGCCAAGCACCAGGCCAAGTGCAACATCTGCAAAGAATGCCCAA |
| | TCATTGGCTTTAGATACCGGAGCCTCAAACACTTTAACTACGACATCTGCCAGAGC |
| | TGCTTCTTCTCCGGCCGGGTGGCCAAGGGCCACAAGATGCACTACCCCATGGTGGA |
| | GTACTGTACCCCAACCACTTCCGGCGAGGACGTGAGAGATTTCGCCAAGGTGCTGA |
| | AGAACAAGTTCCGGACAAAGAGATACTTTGCAAAACACCCAAGAATGGGCTACCTG |
| | CCAGTGCAGACCGTGCTGGAGGGGGACAATATGGAGACAGACACAATGTGA |
| | (SEQ ID NO: 2407) |
| First DRG de- | CAACAAAATCACTGATGCTGGA (SEQ ID NO: 2399) |
| targeting miRNA | |
| binding site | |
| Second DRG de- | CAACAAAATCACTGATGCTGGA (SEQ ID NO: 2399) |
| targeting miRNA | |
| binding site | |
| Short polyA | AGGAATAAAATATCTTTATTTTCATTACATCTGTGTGTTGGTTTTTTGTGTG |
| | (SEQ ID NO: 2410) |
| AAV2 ITR | AGGAACCCCTAGTGATGGAGTTGGCCACTCCCTCTCTGCGCGCTCGCTCGCTCACT |
| | GAGGCCGGGCGACCAAAGGTCGCCCGACGCCCGGGCTTTGCCCGGGCGGCCTCAGT |
| | GAGCGAGCGAGCGCGC (SEQ ID NO: 2411) |

Nucleic acid 22
(SEQ ID NO: 2433)
GCGCGCTCGCTCGCTCACTGAGGCCGCCCGGGCAAAGCCCGGGCGTCGGGCGACCTTTGGTCGCCCGGCCTCAGT
GAGCGAGCGAGCGCGCAGAGAGGGAGTGGCCAACTCCATCACTAGGGGTTCCTTAGTTATTAATAGTAATCAATT
ACGGGGTCATTAGTTCATAGCCCATATATGGAGTTCCGCGTTACATAACTTACGGTAAATGGCCCGCCTGGCTGA
CCGCCCAACGACCCCCGCCCATTGACGTCAATAATGACGTATGTTCCCATAGTAACGCCAATAGGGACTTTCCAT
TGACGTCAATGGGTGGAGTATTTACGGTAAACTGCCCACTTGGCAGTACATCAAGTGTATCATATGCCAAGTACG
CCCCCTATTGACGTCAATGACGGTAAATGGCCCGCCTGGCATTATGCCCAGTACATGACCTTATGGGACTTTCCT
ACTTGGCAGTACATCTACGTATTAGTCATCGCTATTACCATGCTAGACTAGCATGCTGCCCATGTAAGGAGGCAA
GGCCTGGGGACACCCGAGATGCCTGGTTATAATTAACCCAGACATGTGGCTGCCCCCCCCCCCCAACACCTGCTG
CCTCTAAAAATAACCCTGCATGCCATGTTCCCGGCGAAGGGCCAGCTGTCCCCCGCCAGCTAGACTCAGCTCTCA
GGGGCCCCTCCCTGGGGACAGCCCCTCCTGGCTAGTCACACCCTGTAGGCTCCTCTATATAACCCAGGGGCACAG
GGGCTGCCCTCATTCTACCACCACCTCCACAGCACAGACAGACACTCAGGAGCCAGCCAGCCAGCCCAGGTACCT
GGGCAGGTAAGTATCAAGGTTACAAGACAGGTTTAAGGAGACCAATAGAAACTGGGCTTGTCGAGACAGAGAAGA
CTCTTGCGTTTCTGATAGGCACCTATTGGTCTTACTGACATCCACTTTGCCTTTCTCTCCACAGGTGTCCAGACT
AGTGCCACCATGCTGTGGTGGGAGGAGGTGGAGGATTGCTACGAGAGAGAGGACGTGCAGAAGAAAACCTTCACC
AAATGGGTGAACGCCCAGTTCAGCAAGTTTGGCAAGCAGCACATCGAGAACCTGTTCAGCGATCTGCAGGACGGC
CGCAGGCTGCTGGATCTGCTGGAGGGTCTGACCGGCCAGAAACTGCCCAAAGAGAAGGGATCAACCAGGGTGCAC
GCCCTGAATAATGTGAACAAGGCCCTGAGAGTGCTGCAAAATAATAATGTGGATCTGGTGAACATCGGATCTACC
GATATTGTGGACGGCAACCATAAGCTGACTCTGGGCCTGATCTGGAATATCATCCTGCACTGGCAGGTGAAAAAT
GTGATGAAAAACATCATGGCCGGGCTGCAGCAGACCAACTCTGAGAAGATCCTGCTGAGCTGGGTGAGGCAGTCT
ACAAGAAATTACCCCCAGGTGAACGTGATCAATTTCACCACCAGCTGGTCCGACGGGCTGGCTCTGAATGCCCTG
ATTCACAGCCACCGGCCCGACCTGTTCGACTGGAATTCCGTGGTGTGCCAGCAGAGCGCCACACAGAGACTGGAG
CACGCTTTCAATATCGCTCGGTATCAGCTGGGCATCGAGAAGCTGCTGGACCCCGAGGACGTGGACACTACTTAC
CCCGATAAAAAGAGCATCCTGATGTATATCACCTCCCTGTTCCAAGTGCTGCCCCAGCAGGTCTCCATCGAGGCC
ATCCAGGAGGTGGAAATGCTGCCCCGGCCCCCAAAGGTGACAAAGGAAGAACACTTCCAGCTCCACCACCAGATG
CACTACTCTCAGCAGATCACCGTGAGCCTGGCCCAGGGGTACGAGCGGACCTCTTCTCCAAAGCCCCGCTTCAAG
AGCTATGCCTATACCCAGGCCGCCTATGTGACCACCTCCGATCCCACCCGCTCACCCTTCCCTTCTCAACACCTG
GAAGCCCCAGAGGACAAGTCCTTCGGCAGTTCTCTGATGGAGTCTGAGGTGAACCTGGATAGATATCAGACTGCC
CTGGAGGAGGTGCTGTCTTGGCTGCTCTCCGCCGAGGACACCCTGCAGGCACAGGGCGAGATCTCCAACGATGTG
GAGGTGGTGAAGGACCAGTTCCACACACACGAGGGCTATATGATGGACCTGACTGCCCATCAGGGCAGAGTGGGC
AATATCCTGCAGCTGGGTTCCAAACTGATAGGCACCGGAAAGCTGAGCGAAGACGAGGAGACCGAGGTGCAGGAG
CAGATGAATCTGCTGAACTCCCGGTGGGAGTGCCTGCGAGTCGCCAGCATGGAAAAGCAGAGCAACCTGCACCGC
GTGCTCATGGATCTGCAGAATCAGAAGCTGAAGGAGCTGAATGACTGGCTGACCAAGACCGAAGAGCGCACCAGG
AAGATGGAGGAGGAGCCACTGGGCCCCGATCTGGAGGACCTGAAAAGACAGGTGCAGCAGCATAAAGTGCTGCAG
GAGGACCTGGAGCAGGAACAAGTGAGAGTGAATTCTCTGACACACATGGTGGTGGTGGTGGACGAGAGCAGCGGC
GACCACGCAACAGCCGCCCTGGAGGAGCAGCTGAAAGTGCTGGGAGACCGGTGGGCCAACATTTGCCGGTGGACC
GAGGACCGCTGGGTGCTGCTGCAGGACATTCTGCTGAAGTGGCAGCGGCTGACCGAAGAGCAGTGCCTGTTCTCC
GCCTGGCTGAGCGAGAAGGAGGACGCCGTGAATAAGATCCACACCACCGGGTTCAAGGACCAGAATGAGATGCTG
TCCAGCCTGCAGAAGCTGGCCGTGCTGAAGGCCGATCTGGAAAAGAAGAAGCAGAGCATGGGAAAGCTGTATAGC
CTGAAGCAGGACCTGCTGTCTACTCTGAAAAACAAGTCAGTGACCCAGAAGACCGAGGCCTGGCTGGACAACTTC
GCCCGCTGCTGGGACAACCTGGTGCAGAAGCTGGAAAAGAGCACCGCCCAGATCAGCCAGGCAGTGACTACCACA
CAGCCCTCCCTGACACAGACTACTGTGATGGAGACCGTGACAACAGTGACCACAAGGGAGCAGATCCTGGTGAAG
CACGCCCAGGAAGAACTGCCCCCTCCACCCCCTCAGAAGAAGAGAACTCTGGAAAGACTGCAGGAGCTGCAGGAG
GCCACTGACGAGCTGGACCTGAAGCTGCGGCAGGCCGAGGTGATTAAGGGCAGCTGGCAGCCTGTGGGCGATCTG
CTGATCGACAGCCTGCAGGACCACCTGGAGAAGGTGAAAGCCCTGCGGGGCGAGATCGCCCCTCTGAAGGAGAAC
GTCAGCCATGTGAATGACCTGGCCAGACAGCTGACCACACTGGGGATTCAGCTGTCTCCTTACAATCTGTCAACC
CTGGAGGACCTGAACACTCGCTGGAAGCTGCTGCAGGTGGCCGTGGAGGACAGGGTGCGGCAGCTGCACGAAGCC
CATCGCGACTTTGGGCCCGCCTCTCAGCACTTTCTGAGCACCTCCGTGCAGGGACCCTGGGAGCGGGCAATCAGC
CCAAACAAGGTGCCATACTACATCAACCACGAGACCCAGACCACCTGTTGGGATCACCCCAAGATGACAGAGCTG
TACCAGTCTCTGGCTGACCTGAACAACGTGCGGTTCTCAGCCTACAGGACCGCCATGAAGCTGCGGAGACTGCAG
AAGGCCCTGTGCCTGGATCTGCTGAGCCTCTCCGCTGCTTGTGACGCCCTGGATCAGCACAACCTGAAACAGAAC
GACCAGCCAATGGACATCCTGCAGATTATTAATTGCCTGACAACCATCTATGATCGGCTGGAACAGGAGCACAAT
AATCTGGTGAACGTGCCACTGTGCGTGGACATGTGCCTGAATTGGCTGCTGAACGTGTACGACACAGGACGGACC
GGCAGAATCAGAGTGCTGTCTTTTAAGACCGGGATCATCAGCCTGTGCAAAGCCCACCTGGAGGACAAGTACCGG
TATCTGTTCAAACAAGTGGCCTCCAGCACCGGCTTTTGCGACCAGCGCAGGCTGGGCCTGCTGCTCCACGACTCC
ATCCAGATCCCTAGACAGCTGGGCGAGGTGGCTTCTTTTGGCGGATCCAATATCGAGCCCAGTGTGCGGAGCTGT
TTTCAGTTTGCTAATAATAAGCCTGAGATCGAGGCCGCTCTGTTCCTGGACTGGATGAGACTGGAGCCCCAGTCC
ATGGTGTGGCTGCCAGTGCTGCACAGGGTCGCCGCCGCAGAGACTGCCAAGCACCAGGCCAAGTGCAACATCTGC
AAAGAATGCCCAATCATTGGCTTTAGATACCGGAGCCTCAAACACTTTAACTACGACATCTGCCAGAGCTGCTTC
TTCTCCGGCCGGGTGGCCAAGGGCCACAAGATGCACTACCCCATGGTGGAGTACTGTACCCCAACCACTTCCGGC
GAGGACGTGAGAGATTTCGCCAAGGTGCTGAAGAACAAGTTCCGGACAAAGAGATACTTTGCAAAACACCCAAGA
ATGGGCTACCTGCCAGTGCAGACCGTGCTGGAGGGGGACAATATGGAGACAGACACAATGTGATAGATTCCGGCC
TGATTCACAACACCAGCTAGATCAGCGGCCTGATTCACAACACCAGCTAGACGCAGGAATAAAATATCTTTATTT
TCATTACATCTGTGTGTTGGTTTTTTGTGTGAGGAACCCCTAGTGATGGAGTTGGCCACTCCCTCTCTGCGCGCT
CGCTCGCTCACTGAGGCCGGGCGACCAAAGGTCGCCCGACGCCCGGGCTTTGCCCGGGCGGCCTCAGTGAGCGAG
CGAGCGCGC

| Nucleic acid | |
|---|---|
| cargo 22 | |
| annotated | Sequence |
| AAV2 ITR | GCGCGCTCGCTCGCTCACTGAGGCCGCCCGGGCAAAGCCCGGGCGTCGGGCGACCT |
| | TTGGTCGCCCGGCCTCAGTGAGCGAGCGAGCGCGCAGAGAGGGAGTGGCCAACTCC |
| | ATCACTAGGGGTTCCT (SEQ ID NO: 2408) |
| Novel promoter | TAGTTATTAATAGTAATCAATTACGGGGTCATTAGTTCATAGCCCATATATGGAGT |
| | TCCGCGTTACATAACTTACGGTAAATGGCCCGCCTGGCTGACCGCCCAACGACCCC |
| | CGCCCATTGACGTCAATAATGACGTATGTTCCCATAGTAACGCCAATAGGGACTTT |
| | CCATTGACGTCAATGGGTGGAGTATTTACGGTAAACTGCCCACTTGGCAGTACATC |
| | AAGTGTATCATATGCCAAGTACGCCCCCTATTGACGTCAATGACGGTAAATGGCCC |
| | GCCTGGCATTATGCCCAGTACATGACCTTATGGGACTTTCCTACTTGGCAGTACAT |
| | CTACGTATTAGTCATCGCTATTACCATGCTAGACTAGCATGCTGCCCATGTAAGGA |
| | GGCAAGGCCTGGGGACACCCGAGATGCCTGGTTATAATTAACCCAGACATGTGGCT |
| | GCCCCCCCCCCCCAACACCTGCTGCCTCTAAAAATAACCCTGCATGCCATGTTCCC |
| | GGCGAAGGGCCAGCTGTCCCCCGCCAGCTAGACTCAGCTCTCAGGGGCCCCTCCCT |
| | GGGGACAGCCCCTCCTGGCTAGTCACACCCTGTAGGCTCCTCTATATAACCCAGGG |
| | GCACAGGGGCTGCCCTCATTCTACCACCACCTCCACAGCACAGACAGACACTCAGG |
| | AGCCAGCCAGC (SEQ ID NO: 2402) |
| Intron | GTAAGTATCAAGGTTACAAGACAGGTTTAAGGAGACCAATAGAAACTGGGCTTGTC |
| | GAGACAGAGAAGACTCTTGCGTTTCTGATAGGCACCTATTGGTCTTACTGACATCC |
| | ACTTTGCCTTTCTCTCCACAG (SEQ ID NO: 2409) |
| Codon optimized | ATGCTGTGGTGGGAGGAGGTGGAGGATTGCTACGAGAGAGAGGACGTGCAGAAGAA |
| microdystrophin | AACCTTCACCAAATGGGTGAACGCCCAGTTCAGCAAGTTTGGCAAGCAGCACATCG |
| coding sequence | AGAACCTGTTCAGCGATCTGCAGGACGGCCGCAGGCTGCTGGATCTGCTGGAGGGT |
| | CTGACCGGCCAGAAACTGCCCAAAGAGAAGGGATCAACCAGGGTGCACGCCCTGAA |
| | TAATGTGAACAAGGCCCTGAGAGTGCTGCAAAATAATAATGTGGATCTGGTGAACA |
| | TCGGATCTACCGATATTGTGGACGGCAACCATAAGCTGACTCTGGGCCTGATCTGG |
| | AATATCATCCTGCACTGGCAGGTGAAAAATGTGATGAAAAACATCATGGCCGGGCT |
| | GCAGCAGACCAACTCTGAGAAGATCCTGCTGAGCTGGGTGAGGCAGTCTACAAGAA |
| | ATTACCCCCAGGTGAACGTGATCAATTTCACCACCAGCTGGTCCGACGGGCTGGCT |
| | CTGAATGCCCTGATTCACAGCCACCGGCCCGACCTGTTCGACTGGAATTCCGTGGT |
| | GTGCCAGCAGAGCGCCACACAGAGACTGGAGCACGCTTTCAATATCGCTCGGTATC |
| | AGCTGGGCATCGAGAAGCTGCTGGACCCCGAGGACGTGGACACTACTTACCCCGAT |
| | AAAAAGAGCATCCTGATGTATATCACCTCCCTGTTCCAAGTGCTGCCCCAGCAGGT |
| | CTCCATCGAGGCCATCCAGGAGGTGGAAATGCTGCCCCGGCCCCCAAAGGTGACAA |
| | AGGAAGAACACTTCCAGCTCCACCACCAGATGCACTACTCTCAGCAGATCACCGTG |
| | AGCCTGGCCCAGGGGTACGAGCGGACCTCTTCTCCAAAGCCCCGCTTCAAGAGCTA |
| | TGCCTATACCCAGGCCGCCTATGTGACCACCTCCGATCCCACCCGCTCACCCTTCC |
| | CTTCTCAACACCTGGAAGCCCCAGAGGACAAGTCCTTCGGCAGTTCTCTGATGGAG |
| | TCTGAGGTGAACCTGGATAGATATCAGACTGCCCTGGAGGAGGTGCTGTCTTGGCT |
| | GCTCTCCGCCGAGGACACCCTGCAGGCACAGGGCGAGATCTCCAACGATGTGGAGG |
| | TGGTGAAGGACCAGTTCCACACACACGAGGGCTATATGATGGACCTGACTGCCCAT |
| | CAGGGCAGAGTGGGCAATATCCTGCAGCTGGGTTCCAAACTGATAGGCACCGGAAA |
| | GCTGAGCGAAGACGAGGAGACCGAGGTGCAGGAGCAGATGAATCTGCTGAACTCCC |
| | GGTGGGAGTGCCTGCGAGTCGCCAGCATGGAAAAGCAGAGCAACCTGCACCGCGTG |
| | CTCATGGATCTGCAGAATCAGAAGCTGAAGGAGCTGAATGACTGGCTGACCAAGAC |
| | CGAAGAGCGCACCAGGAAGATGGAGGAGGAGCCACTGGGCCCCGATCTGGAGGACC |
| | TGAAAAGACAGGTGCAGCAGCATAAAGTGCTGCAGGAGGACCTGGAGCAGGAACAA |
| | GTGAGAGTGAATTCTCTGACACACATGGTGGTGGTGGTGGACGAGAGCAGCGGCGA |
| | CCACGCAACAGCCGCCCTGGAGGAGCAGCTGAAAGTGCTGGGAGACCGGTGGGCCA |
| | ACATTTGCCGGTGGACCGAGGACCGCTGGGTGCTGCTGCAGGACATTCTGCTGAAG |
| | TGGCAGCGGCTGACCGAAGAGCAGTGCCTGTTCTCCGCCTGGCTGAGCGAGAAGGA |
| | GGACGCCGTGAATAAGATCCACACCACCGGGTTCAAGGACCAGAATGAGATGCTGT |
| | CCAGCCTGCAGAAGCTGGCCGTGCTGAAGGCCGATCTGGAAAAGAAGAAGCAGAGC |
| | ATGGGAAAGCTGTATAGCCTGAAGCAGGACCTGCTGTCTACTCTGAAAAACAAGTC |
| | AGTGACCCAGAAGACCGAGGCCTGGCTGGACAACTTCGCCCGCTGCTGGGACAACC |
| | TGGTGCAGAAGCTGGAAAAGAGCACCGCCCAGATCAGCCAGGCAGTGACTACCACA |
| | CAGCCCTCCCTGACACAGACTACTGTGATGGAGACCGTGACAACAGTGACCACAAG |
| | GGAGCAGATCCTGGTGAAGCACGCCCAGGAAGAACTGCCCCCTCCACCCCCTCAGA |
| | AGAAGAGAACTCTGGAAAGACTGCAGGAGCTGCAGGAGGCCACTGACGAGCTGGAC |
| | CTGAAGCTGCGGCAGGCCGAGGTGATTAAGGGCAGCTGGCAGCCTGTGGGCGATCT |
| | GCTGATCGACAGCCTGCAGGACCACCTGGAGAAGGTGAAAGCCCTGCGGGGCGAGA |
| | TCGCCCCTCTGAAGGAGAACGTCAGCCATGTGAATGACCTGGCCAGACAGCTGACC |
| | ACACTGGGGATTCAGCTGTCTCCTTACAATCTGTCAACCCTGGAGGACCTGAACAC |
| | TCGCTGGAAGCTGCTGCAGGTGGCCGTGGAGGACAGGGTGCGGCAGCTGCACGAAG |
| | CCCATCGCGACTTTGGGCCCGCCTCTCAGCACTTTCTGAGCACCTCCGTGCAGGGA |
| | CCCTGGGAGCGGGCAATCAGCCCAAACAAGGTGCCATACTACATCAACCACGAGAC |
| | CCAGACCACCTGTTGGGATCACCCCAAGATGACAGAGCTGTACCAGTCTCTGGCTG |
| | ACCTGAACAACGTGCGGTTCTCAGCCTACAGGACCGCCATGAAGCTGCGGAGACTG |
| | CAGAAGGCCCTGTGCCTGGATCTGCTGAGCCTCTCCGCTGCTTGTGACGCCCTGGA |
| | TCAGCACAACCTGAAACAGAACGACCAGCCAATGGACATCCTGCAGATTATTAATT |
| | GCCTGACAACCATCTATGATCGGCTGGAACAGGAGCACAATAATCTGGTGAACGTG |
| | CCACTGTGCGTGGACATGTGCCTGAATTGGCTGCTGAACGTGTACGACACAGGACG |
| | GACCGGCAGAATCAGAGTGCTGTCTTTTAAGACCGGGATCATCAGCCTGTGCAAAG |
| | CCCACCTGGAGGACAAGTACCGGTATCTGTTCAAACAAGTGGCCTCCAGCACCGGC |
| | TTTTGCGACCAGCGCAGGCTGGGCCTGCTGCTCCACGACTCCATCCAGATCCCTAG |
| | ACAGCTGGGCGAGGTGGCTTCTTTTGGCGGATCCAATATCGAGCCCAGTGTGCGGA |
| | GCTGTTTTCAGTTTGCTAATAATAAGCCTGAGATCGAGGCCGCTCTGTTCCTGGAC |
| | TGGATGAGACTGGAGCCCCAGTCCATGGTGTGGCTGCCAGTGCTGCACAGGGTCGC |
| | CGCCGCAGAGACTGCCAAGCACCAGGCCAAGTGCAACATCTGCAAAGAATGCCCAA |
| | TCATTGGCTTTAGATACCGGAGCCTCAAACACTTTAACTACGACATCTGCCAGAGC |
| | TGCTTCTTCTCCGGCCGGGTGGCCAAGGGCCACAAGATGCACTACCCCATGGTGGA |
| | GTACTGTACCCCAACCACTTCCGGCGAGGACGTGAGAGATTTCGCCAAGGTGCTGA |
| | AGAACAAGTTCCGGACAAAGAGATACTTTGCAAAACACCCAAGAATGGGCTACCTG |
| | CCAGTGCAGACCGTGCTGGAGGGGGACAATATGGAGACAGACACAATGTGA |
| | (SEQ ID NO: 2407) |
| First DRG de- | CGGCCTGATTCACAACACCAGCT (SEQ ID NO: 2400) |
| targeting miRNA | |
| binding site | |
| Second DRG de- | CGGCCTGATTCACAACACCAGCT (SEQ ID NO: 2400) |
| targeting miRNA | |
| binding site | |
| Short polyA | AGGAATAAAATATCTTTATTTTCATTACATCTGTGTGTTGGTTTTTTGTGTG |
| | (SEQ ID NO: 2410) |
| AAV2 ITR | AGGAACCCCTAGTGATGGAGTTGGCCACTCCCTCTCTGCGCGCTCGCTCGCTCACT |
| | GAGGCCGGGCGACCAAAGGTCGCCCGACGCCCGGGCTTTGCCCGGGCGGCCTCAGT |
| | GAGCGAGCGAGCGCGC (SEQ ID NO: 2411) |

Nucleic acid 23
(SEQ ID NO: 2434)
GCGCGCTCGCTCGCTCACTGAGGCCGCCCGGGCAAAGCCCGGGCGTCGGGCGACCTTTGGTCGCCCGGCCTCAGT
GAGCGAGCGAGCGCGCAGAGAGGGAGTGGCCAACTCCATCACTAGGGGTTCCTCGTCTGTCTAATTCCAGCCAAG
GGCATGGGGGAAAGGACAGAGCCCAGGGACCTGTGGCCTATTCTCTGAGAGGACGCTGGGCTAATAATAGGAGGG
GAGATTAGGGAGGGATTTGACTGCATTGTTATCTCACAGGAATGGCGTTTGAGAGCCTTGCTTCCAAGCTCTTCC
AAGAGTCATGCCACCCCCCTCCAATCTCTGTGGAAGTGCCCACTGCCTTTCCCGCTTCGTTCTCTTCTCTCTAAA
TCTGAGCCCACCCCACTCAGGGGTACAGGATCTGGTTCATTTATCTCCCAGAATGATGCCTTGGGTTGCGTCCCC
TCTAAACTCTGGCACATTCCAGCCCCTCTTTGGGAGAAAGAACATCTCTTCTTGCCCAGGCCCTAGTGAGACATG
CATCGCAAGACATGCTCCCCCCTTCCTCCCCGCTGGGCTCCAGCTGCTGCCAGCCCTCCAAGAAAGGAGAGGCCC
TGAGTTGGGCTATTTTGGTATCTGGGGTGGGCACCCGCAGGGCTAAGGTTACCTTGGTATGTTAAGGGCTCCCTG
GGGCAGGACTATATAACCCCAGAGGGACTGCCCCATGCTGACTCCTTGCTTCTTTCCTGCTCGAGCCGCTGCCTT
GCCCCCCGGAGACTGAAGACACAGCCCAGGTACCTGGGCAGGTAAGTATCAAGGTTACAAGACAGGTTTAAGGAG
ACCAATAGAAACTGGGCTTGTCGAGACAGAGAAGACTCTTGCGTTTCTGATAGGCACCTATTGGTCTTACTGACA
TCCACTTTGCCTTTCTCTCCACAGGTGTCCAGACTAGTGCCACCATGCTGTGGTGGGAGGAGGTGGAGGATTGCT
ACGAGAGAGAGGACGTGCAGAAGAAAACCTTCACCAAATGGGTGAACGCCCAGTTCAGCAAGTTTGGCAAGCAGC
ACATCGAGAACCTGTTCAGCGATCTGCAGGACGGCCGCAGGCTGCTGGATCTGCTGGAGGGTCTGACCGGCCAGA
AACTGCCCAAAGAGAAGGGATCAACCAGGGTGCACGCCCTGAATAATGTGAACAAGGCCCTGAGAGTGCTGCAAA
ATAATAATGTGGATCTGGTGAACATCGGATCTACCGATATTGTGGACGGCAACCATAAGCTGACTCTGGGCCTGA
TCTGGAATATCATCCTGCACTGGCAGGTGAAAAATGTGATGAAAAACATCATGGCCGGGCTGCAGCAGACCAACT
CTGAGAAGATCCTGCTGAGCTGGGTGAGGCAGTCTACAAGAAATTACCCCCAGGTGAACGTGATCAATTTCACCA
CCAGCTGGTCCGACGGGCTGGCTCTGAATGCCCTGATTCACAGCCACCGGCCCGACCTGTTCGACTGGAATTCCG
TGGTGTGCCAGCAGAGCGCCACACAGAGACTGGAGCACGCTTTCAATATCGCTCGGTATCAGCTGGGCATCGAGA
AGCTGCTGGACCCCGAGGACGTGGACACTACTTACCCCGATAAAAAGAGCATCCTGATGTATATCACCTCCCTGT
TCCAAGTGCTGCCCCAGCAGGTCTCCATCGAGGCCATCCAGGAGGTGGAAATGCTGCCCCGGCCCCCAAAGGTGA
CAAAGGAAGAACACTTCCAGCTCCACCACCAGATGCACTACTCTCAGCAGATCACCGTGAGCCTGGCCCAGGGGT
ACGAGCGGACCTCTTCTCCAAAGCCCCGCTTCAAGAGCTATGCCTATACCCAGGCCGCCTATGTGACCACCTCCG
ATCCCACCCGCTCACCCTTCCCTTCTCAACACCTGGAAGCCCCAGAGGACAAGTCCTTCGGCAGTTCTCTGATGG
AGTCTGAGGTGAACCTGGATAGATATCAGACTGCCCTGGAGGAGGTGCTGTCTTGGCTGCTCTCCGCCGAGGACA
CCCTGCAGGCACAGGGCGAGATCTCCAACGATGTGGAGGTGGTGAAGGACCAGTTCCACACACACGAGGGCTATA
TGATGGACCTGACTGCCCATCAGGGCAGAGTGGGCAATATCCTGCAGCTGGGTTCCAAACTGATAGGCACCGGAA
AGCTGAGCGAAGACGAGGAGACCGAGGTGCAGGAGCAGATGAATCTGCTGAACTCCCGGTGGGAGTGCCTGCGAG
TCGCCAGCATGGAAAAGCAGAGCAACCTGCACCGCGTGCTCATGGATCTGCAGAATCAGAAGCTGAAGGAGCTGA
ATGACTGGCTGACCAAGACCGAAGAGCGCACCAGGAAGATGGAGGAGGAGCCACTGGGCCCCGATCTGGAGGACC
TGAAAAGACAGGTGCAGCAGCATAAAGTGCTGCAGGAGGACCTGGAGCAGGAACAAGTGAGAGTGAATTCTCTGA
CACACATGGTGGTGGTGGTGGACGAGAGCAGCGGCGACCACGCAACAGCCGCCCTGGAGGAGCAGCTGAAAGTGC
TGGGAGACCGGTGGGCCAACATTTGCCGGTGGACCGAGGACCGCTGGGTGCTGCTGCAGGACATTCTGCTGAAGT
GGCAGCGGCTGACCGAAGAGCAGTGCCTGTTCTCCGCCTGGCTGAGCGAGAAGGAGGACGCCGTGAATAAGATCC
ACACCACCGGGTTCAAGGACCAGAATGAGATGCTGTCCAGCCTGCAGAAGCTGGCCGTGCTGAAGGCCGATCTGG
AAAAGAAGAAGCAGAGCATGGGAAAGCTGTATAGCCTGAAGCAGGACCTGCTGTCTACTCTGAAAAACAAGTCAG
TGACCCAGAAGACCGAGGCCTGGCTGGACAACTTCGCCCGCTGCTGGGACAACCTGGTGCAGAAGCTGGAAAAGA
GCACCGCCCAGATCAGCCAGGCAGTGACTACCACACAGCCCTCCCTGACACAGACTACTGTGATGGAGACCGTGA
CAACAGTGACCACAAGGGAGCAGATCCTGGTGAAGCACGCCCAGGAAGAACTGCCCCCTCCACCCCCTCAGAAGA
AGAGAACTCTGGAAAGACTGCAGGAGCTGCAGGAGGCCACTGACGAGCTGGACCTGAAGCTGCGGCAGGCCGAGG
TGATTAAGGGCAGCTGGCAGCCTGTGGGCGATCTGCTGATCGACAGCCTGCAGGACCACCTGGAGAAGGTGAAAG
CCCTGCGGGGCGAGATCGCCCCTCTGAAGGAGAACGTCAGCCATGTGAATGACCTGGCCAGACAGCTGACCACAC
TGGGGATTCAGCTGTCTCCTTACAATCTGTCAACCCTGGAGGACCTGAACACTCGCTGGAAGCTGCTGCAGGTGG
CCGTGGAGGACAGGGTGCGGCAGCTGCACGAAGCCCATCGCGACTTTGGGCCCGCCTCTCAGCACTTTCTGAGCA
CCTCCGTGCAGGGACCCTGGGAGCGGGCAATCAGCCCAAACAAGGTGCCATACTACATCAACCACGAGACCCAGA
CCACCTGTTGGGATCACCCCAAGATGACAGAGCTGTACCAGTCTCTGGCTGACCTGAACAACGTGCGGTTCTCAG
CCTACAGGACCGCCATGAAGCTGCGGAGACTGCAGAAGGCCCTGTGCCTGGATCTGCTGAGCCTCTCCGCTGCTT
GTGACGCCCTGGATCAGCACAACCTGAAACAGAACGACCAGCCAATGGACATCCTGCAGATTATTAATTGCCTGA
CAACCATCTATGATCGGCTGGAACAGGAGCACAATAATCTGGTGAACGTGCCACTGTGCGTGGACATGTGCCTGA
ATTGGCTGCTGAACGTGTACGACACAGGACGGACCGGCAGAATCAGAGTGCTGTCTTTTAAGACCGGGATCATCA
GCCTGTGCAAAGCCCACCTGGAGGACAAGTACCGGTATCTGTTCAAACAAGTGGCCTCCAGCACCGGCTTTTGCG
ACCAGCGCAGGCTGGGCCTGCTGCTCCACGACTCCATCCAGATCCCTAGACAGCTGGGCGAGGTGGCTTCTTTTG
GCGGATCCAATATCGAGCCCAGTGTGCGGAGCTGTTTTCAGTTTGCTAATAATAAGCCTGAGATCGAGGCCGCTC
TGTTCCTGGACTGGATGAGACTGGAGCCCCAGTCCATGGTGTGGCTGCCAGTGCTGCACAGGGTCGCCGCCGCAG
AGACTGCCAAGCACCAGGCCAAGTGCAACATCTGCAAAGAATGCCCAATCATTGGCTTTAGATACCGGAGCCTCA
AACACTTTAACTACGACATCTGCCAGAGCTGCTTCTTCTCCGGCCGGGTGGCCAAGGGCCACAAGATGCACTACC
CCATGGTGGAGTACTGTACCCCAACCACTTCCGGCGAGGACGTGAGAGATTTCGCCAAGGTGCTGAAGAACAAGT
TCCGGACAAAGAGATACTTTGCAAAACACCCAAGAATGGGCTACCTGCCAGTGCAGACCGTGCTGGAGGGGGACA
ATATGGAGACAGACACAATGTGATAGATTCCGGCCTGATTCACAACACCAGCTAGATCAGCGGCCTGATTCACAA
CACCAGCTAGACGCAGGAATAAAATATCTTTATTTTCATTACATCTGTGTGTTGGTTTTTTGTGTGAGGAACCCC
TAGTGATGGAGTTGGCCACTCCCTCTCTGCGCGCTCGCTCGCTCACTGAGGCCGGGCGACCAAAGGTCGCCCGAC
GCCCGGGCTTTGCCCGGGCGGCCTCAGTGAGCGAGCGAGCGCGC

| Nucleic acid | |
|---|---|
| cargo 23 | |
| annotated | Sequence |
| AAV2 ITR | GCGCGCTCGCTCGCTCACTGAGGCCGCCCGGGCAAAGCCCGGGCGTCGGGCGACCT |
| | TTGGTCGCCCGGCCTCAGTGAGCGAGCGAGCGCGCAGAGAGGGAGTGGCCAACTCC |
| | ATCACTAGGGGTTCCT (SEQ ID NO: 2408) |
| Novel promoter | CGTCTGTCTAATTCCAGCCAAGGGCATGGGGGAAAGGACAGAGCCCAGGGACCTGT |
| | GGCCTATTCTCTGAGAGGACGCTGGGCTAATAATAGGAGGGGAGATTAGGGAGGGA |
| | TTTGACTGCATTGTTATCTCACAGGAATGGCGTTTGAGAGCCTTGCTTCCAAGCTC |
| | TTCCAAGAGTCATGCCACCCCCCTCCAATCTCTGTGGAAGTGCCCACTGCCTTTCC |
| | CGCTTCGTTCTCTTCTCTCTAAATCTGAGCCCACCCCACTCAGGGGTACAGGATCT |
| | GGTTCATTTATCTCCCAGAATGATGCCTTGGGTTGCGTCCCCTCTAAACTCTGGCA |
| | CATTCCAGCCCCTCTTTGGGAGAAAGAACATCTCTTCTTGCCCAGGCCCTAGTGAG |
| | ACATGCATCGCAAGACATGCTCCCCCCTTCCTCCCCGCTGGGCTCCAGCTGCTGCC |
| | AGCCCTCCAAGAAAGGAGAGGCCCTGAGTTGGGCTATTTTGGTATCTGGGGTGGGC |
| | ACCCGCAGGGCTAAGGTTACCTTGGTATGTTAAGGGCTCCCTGGGGCAGGACTATA |
| | TAACCCCAGAGGGACTGCCCCATGCTGACTCCTTGCTTCTTTCCTGCTCGAGCCGC |
| | TGCCTTGCCCCCCGGAGACTGAAGACA (SEQ ID NO: 2403) |
| Intron | GTAAGTATCAAGGTTACAAGACAGGTTTAAGGAGACCAATAGAAACTGGGCTTGTC |
| | GAGACAGAGAAGACTCTTGCGTTTCTGATAGGCACCTATTGGTCTTACTGACATCC |
| | ACTTTGCCTTTCTCTCCACAG (SEQ ID NO: 2409) |
| Codon optimized | ATGCTGTGGTGGGAGGAGGTGGAGGATTGCTACGAGAGAGAGGACGTGCAGAAGAA |
| microdystrophin | AACCTTCACCAAATGGGTGAACGCCCAGTTCAGCAAGTTTGGCAAGCAGCACATCG |
| coding sequence | AGAACCTGTTCAGCGATCTGCAGGACGGCCGCAGGCTGCTGGATCTGCTGGAGGGT |
| | CTGACCGGCCAGAAACTGCCCAAAGAGAAGGGATCAACCAGGGTGCACGCCCTGAA |
| | TAATGTGAACAAGGCCCTGAGAGTGCTGCAAAATAATAATGTGGATCTGGTGAACA |
| | TCGGATCTACCGATATTGTGGACGGCAACCATAAGCTGACTCTGGGCCTGATCTGG |
| | AATATCATCCTGCACTGGCAGGTGAAAAATGTGATGAAAAACATCATGGCCGGGCT |
| | GCAGCAGACCAACTCTGAGAAGATCCTGCTGAGCTGGGTGAGGCAGTCTACAAGAA |
| | ATTACCCCCAGGTGAACGTGATCAATTTCACCACCAGCTGGTCCGACGGGCTGGCT |
| | CTGAATGCCCTGATTCACAGCCACCGGCCCGACCTGTTCGACTGGAATTCCGTGGT |
| | GTGCCAGCAGAGCGCCACACAGAGACTGGAGCACGCTTTCAATATCGCTCGGTATC |
| | AGCTGGGCATCGAGAAGCTGCTGGACCCCGAGGACGTGGACACTACTTACCCCGAT |
| | AAAAAGAGCATCCTGATGTATATCACCTCCCTGTTCCAAGTGCTGCCCCAGCAGGT |
| | CTCCATCGAGGCCATCCAGGAGGTGGAAATGCTGCCCCGGCCCCCAAAGGTGACAA |
| | AGGAAGAACACTTCCAGCTCCACCACCAGATGCACTACTCTCAGCAGATCACCGTG |
| | AGCCTGGCCCAGGGGTACGAGCGGACCTCTTCTCCAAAGCCCCGCTTCAAGAGCTA |
| | TGCCTATACCCAGGCCGCCTATGTGACCACCTCCGATCCCACCCGCTCACCCTTCC |
| | CTTCTCAACACCTGGAAGCCCCAGAGGACAAGTCCTTCGGCAGTTCTCTGATGGAG |
| | TCTGAGGTGAACCTGGATAGATATCAGACTGCCCTGGAGGAGGTGCTGTCTTGGCT |
| | GCTCTCCGCCGAGGACACCCTGCAGGCACAGGGCGAGATCTCCAACGATGTGGAGG |
| | TGGTGAAGGACCAGTTCCACACACACGAGGGCTATATGATGGACCTGACTGCCCAT |
| | CAGGGCAGAGTGGGCAATATCCTGCAGCTGGGTTCCAAACTGATAGGCACCGGAAA |
| | GCTGAGCGAAGACGAGGAGACCGAGGTGCAGGAGCAGATGAATCTGCTGAACTCCC |
| | GGTGGGAGTGCCTGCGAGTCGCCAGCATGGAAAAGCAGAGCAACCTGCACCGCGTG |
| | CTCATGGATCTGCAGAATCAGAAGCTGAAGGAGCTGAATGACTGGCTGACCAAGAC |
| | CGAAGAGCGCACCAGGAAGATGGAGGAGGAGCCACTGGGCCCCGATCTGGAGGACC |
| | TGAAAAGACAGGTGCAGCAGCATAAAGTGCTGCAGGAGGACCTGGAGCAGGAACAA |
| | GTGAGAGTGAATTCTCTGACACACATGGTGGTGGTGGTGGACGAGAGCAGCGGCGA |
| | CCACGCAACAGCCGCCCTGGAGGAGCAGCTGAAAGTGCTGGGAGACCGGTGGGCCA |
| | ACATTTGCCGGTGGACCGAGGACCGCTGGGTGCTGCTGCAGGACATTCTGCTGAAG |
| | TGGCAGCGGCTGACCGAAGAGCAGTGCCTGTTCTCCGCCTGGCTGAGCGAGAAGGA |
| | GGACGCCGTGAATAAGATCCACACCACCGGGTTCAAGGACCAGAATGAGATGCTGT |
| | CCAGCCTGCAGAAGCTGGCCGTGCTGAAGGCCGATCTGGAAAAGAAGAAGCAGAGC |
| | ATGGGAAAGCTGTATAGCCTGAAGCAGGACCTGCTGTCTACTCTGAAAAACAAGTC |
| | AGTGACCCAGAAGACCGAGGCCTGGCTGGACAACTTCGCCCGCTGCTGGGACAACC |
| | TGGTGCAGAAGCTGGAAAAGAGCACCGCCCAGATCAGCCAGGCAGTGACTACCACA |
| | CAGCCCTCCCTGACACAGACTACTGTGATGGAGACCGTGACAACAGTGACCACAAG |
| | GGAGCAGATCCTGGTGAAGCACGCCCAGGAAGAACTGCCCCCTCCACCCCCTCAGA |
| | AGAAGAGAACTCTGGAAAGACTGCAGGAGCTGCAGGAGGCCACTGACGAGCTGGAC |
| | CTGAAGCTGCGGCAGGCCGAGGTGATTAAGGGCAGCTGGCAGCCTGTGGGCGATCT |
| | GCTGATCGACAGCCTGCAGGACCACCTGGAGAAGGTGAAAGCCCTGCGGGGCGAGA |
| | TCGCCCCTCTGAAGGAGAACGTCAGCCATGTGAATGACCTGGCCAGACAGCTGACC |
| | ACACTGGGGATTCAGCTGTCTCCTTACAATCTGTCAACCCTGGAGGACCTGAACAC |
| | TCGCTGGAAGCTGCTGCAGGTGGCCGTGGAGGACAGGGTGCGGCAGCTGCACGAAG |
| | CCCATCGCGACTTTGGGCCCGCCTCTCAGCACTTTCTGAGCACCTCCGTGCAGGGA |
| | CCCTGGGAGCGGGCAATCAGCCCAAACAAGGTGCCATACTACATCAACCACGAGAC |
| | CCAGACCACCTGTTGGGATCACCCCAAGATGACAGAGCTGTACCAGTCTCTGGCTG |
| | ACCTGAACAACGTGCGGTTCTCAGCCTACAGGACCGCCATGAAGCTGCGGAGACTG |
| | CAGAAGGCCCTGTGCCTGGATCTGCTGAGCCTCTCCGCTGCTTGTGACGCCCTGGA |
| | TCAGCACAACCTGAAACAGAACGACCAGCCAATGGACATCCTGCAGATTATTAATT |
| | GCCTGACAACCATCTATGATCGGCTGGAACAGGAGCACAATAATCTGGTGAACGTG |
| | CCACTGTGCGTGGACATGTGCCTGAATTGGCTGCTGAACGTGTACGACACAGGACG |
| | GACCGGCAGAATCAGAGTGCTGTCTTTTAAGACCGGGATCATCAGCCTGTGCAAAG |
| | CCCACCTGGAGGACAAGTACCGGTATCTGTTCAAACAAGTGGCCTCCAGCACCGGC |
| | TTTTGCGACCAGCGCAGGCTGGGCCTGCTGCTCCACGACTCCATCCAGATCCCTAG |
| | ACAGCTGGGCGAGGTGGCTTCTTTTGGCGGATCCAATATCGAGCCCAGTGTGCGGA |
| | GCTGTTTTCAGTTTGCTAATAATAAGCCTGAGATCGAGGCCGCTCTGTTCCTGGAC |
| | TGGATGAGACTGGAGCCCCAGTCCATGGTGTGGCTGCCAGTGCTGCACAGGGTCGC |
| | CGCCGCAGAGACTGCCAAGCACCAGGCCAAGTGCAACATCTGCAAAGAATGCCCAA |
| | TCATTGGCTTTAGATACCGGAGCCTCAAACACTTTAACTACGACATCTGCCAGAGC |
| | TGCTTCTTCTCCGGCCGGGTGGCCAAGGGCCACAAGATGCACTACCCCATGGTGGA |
| | GTACTGTACCCCAACCACTTCCGGCGAGGACGTGAGAGATTTCGCCAAGGTGCTGA |
| | AGAACAAGTTCCGGACAAAGAGATACTTTGCAAAACACCCAAGAATGGGCTACCTG |
| | CCAGTGCAGACCGTGCTGGAGGGGGACAATATGGAGACAGACACAATGTGA |
| | (SEQ ID NO: 2407) |
| First DRG de- | CAACAAAATCACTGATGCTGGA (SEQ ID NO: 2400) |
| targeting miRNA | |
| binding site | |
| Second DRG de- | CAACAAAATCACTGATGCTGGA (SEQ ID NO: 2400) |
| targeting miRNA | |
| binding site | |
| Short polyA | AGGAATAAAATATCTTTATTTTCATTACATCTGTGTGTTGGTTTTTTGTGTG |
| | (SEQ ID NO: 2410) |
| AAV2 ITR | AGGAACCCCTAGTGATGGAGTTGGCCACTCCCTCTCTGCGCGCTCGCTCGCTCACT |
| | GAGGCCGGGCGACCAAAGGTCGCCCGACGCCCGGGCTTTGCCCGGGCGGCCTCAGT |
| | GAGCGAGCGAGCGCGC (SEQ ID NO: 2411) |

Nucleic acid 24
(SEQ ID NO: 2435)
GCGCGCTCGCTCGCTCACTGAGGCCGCCCGGGCAAAGCCCGGGCGTCGGGCGACCTTTGGTCGCCCGGCCTCAGT
GAGCGAGCGAGCGCGCAGAGAGGGAGTGGCCAACTCCATCACTAGGGGTTCCTCGTCTGTCTAATTCCAGCCAAG
GGCATGGGGGAAAGGACAGAGCCCAGGGACCTGTGGCCTATTCTCTGAGAGGACGCTGGGCTAATAATAGGAGGG
GAGATTAGGGAGGGATTTGACTGCATTGTTATCTCACAGGAATGGCGTTTGAGAGCCTTGCTTCCAAGCTCTTCC
AAGAGTCATGCCACCCCCCTCCAATCTCTGTGGAAGTGCCCACTGCCTTTCCCGCTTCGTTCTCTTCTCTCGGTC
CCATCCCTGACCCACTAGCCTGGTGCCGGGGGGAGACCAATTTCTGGAGGAAGCTCTGGGTACCCAGTCTTGCCC
TAAGCCTGCCTCTGAACAGGCTGTTCTTGTTTATGACCCCCGTCCCAGCAGAATAGTGATTGCTCATCCCTGCAT
GTGATTTGAGAGGGCCAGTCTTTCAGGCCTGGAGGAAACTCAAGCCCCACCAGCCGCTTGGCATCGGAATGCTCA
GCTGGTCCCCTCCTGGGGCTCATGTGACCAAGATCTAGCTATAAATATCAGAGGGGCCTCAGACCAAGACAGAAT
TCGGGCACCAGGAGAAGGAAGCCAACAGGATCCGACCCGGTGTTTTGTGACAAAGGCAAGACCCCCAGGTCTACT
TAGAGCAACGTTAGTAGAGGACAGCCCAGGTACCTGGGCAGGTAAGTATCAAGGTTACAAGACAGGTTTAAGGAG
ACCAATAGAAACTGGGCTTGTCGAGACAGAGAAGACTCTTGCGTTTCTGATAGGCACCTATTGGTCTTACTGACA
TCCACTTTGCCTTTCTCTCCACAGGTGTCCAGACTAGTGCCACCATGCTGTGGTGGGAGGAGGTGGAGGATTGCT
ACGAGAGAGAGGACGTGCAGAAGAAAACCTTCACCAAATGGGTGAACGCCCAGTTCAGCAAGTTTGGCAAGCAGC
ACATCGAGAACCTGTTCAGCGATCTGCAGGACGGCCGCAGGCTGCTGGATCTGCTGGAGGGTCTGACCGGCCAGA
AACTGCCCAAAGAGAAGGGATCAACCAGGGTGCACGCCCTGAATAATGTGAACAAGGCCCTGAGAGTGCTGCAAA
ATAATAATGTGGATCTGGTGAACATCGGATCTACCGATATTGTGGACGGCAACCATAAGCTGACTCTGGGCCTGA
TCTGGAATATCATCCTGCACTGGCAGGTGAAAAATGTGATGAAAAACATCATGGCCGGGCTGCAGCAGACCAACT
CTGAGAAGATCCTGCTGAGCTGGGTGAGGCAGTCTACAAGAAATTACCCCCAGGTGAACGTGATCAATTTCACCA
CCAGCTGGTCCGACGGGCTGGCTCTGAATGCCCTGATTCACAGCCACCGGCCCGACCTGTTCGACTGGAATTCCG
TGGTGTGCCAGCAGAGCGCCACACAGAGACTGGAGCACGCTTTCAATATCGCTCGGTATCAGCTGGGCATCGAGA
AGCTGCTGGACCCCGAGGACGTGGACACTACTTACCCCGATAAAAAGAGCATCCTGATGTATATCACCTCCCTGT
TCCAAGTGCTGCCCCAGCAGGTCTCCATCGAGGCCATCCAGGAGGTGGAAATGCTGCCCCGGCCCCCAAAGGTGA
CAAAGGAAGAACACTTCCAGCTCCACCACCAGATGCACTACTCTCAGCAGATCACCGTGAGCCTGGCCCAGGGGT
ACGAGCGGACCTCTTCTCCAAAGCCCCGCTTCAAGAGCTATGCCTATACCCAGGCCGCCTATGTGACCACCTCCG
ATCCCACCCGCTCACCCTTCCCTTCTCAACACCTGGAAGCCCCAGAGGACAAGTCCTTCGGCAGTTCTCTGATGG
AGTCTGAGGTGAACCTGGATAGATATCAGACTGCCCTGGAGGAGGTGCTGTCTTGGCTGCTCTCCGCCGAGGACA
CCCTGCAGGCACAGGGCGAGATCTCCAACGATGTGGAGGTGGTGAAGGACCAGTTCCACACACACGAGGGCTATA
TGATGGACCTGACTGCCCATCAGGGCAGAGTGGGCAATATCCTGCAGCTGGGTTCCAAACTGATAGGCACCGGAA
AGCTGAGCGAAGACGAGGAGACCGAGGTGCAGGAGCAGATGAATCTGCTGAACTCCCGGTGGGAGTGCCTGCGAG
TCGCCAGCATGGAAAAGCAGAGCAACCTGCACCGCGTGCTCATGGATCTGCAGAATCAGAAGCTGAAGGAGCTGA
ATGACTGGCTGACCAAGACCGAAGAGCGCACCAGGAAGATGGAGGAGGAGCCACTGGGCCCCGATCTGGAGGACC
TGAAAAGACAGGTGCAGCAGCATAAAGTGCTGCAGGAGGACCTGGAGCAGGAACAAGTGAGAGTGAATTCTCTGA
CACACATGGTGGTGGTGGTGGACGAGAGCAGCGGCGACCACGCAACAGCCGCCCTGGAGGAGCAGCTGAAAGTGC
TGGGAGACCGGTGGGCCAACATTTGCCGGTGGACCGAGGACCGCTGGGTGCTGCTGCAGGACATTCTGCTGAAGT
GGCAGCGGCTGACCGAAGAGCAGTGCCTGTTCTCCGCCTGGCTGAGCGAGAAGGAGGACGCCGTGAATAAGATCC
ACACCACCGGGTTCAAGGACCAGAATGAGATGCTGTCCAGCCTGCAGAAGCTGGCCGTGCTGAAGGCCGATCTGG
AAAAGAAGAAGCAGAGCATGGGAAAGCTGTATAGCCTGAAGCAGGACCTGCTGTCTACTCTGAAAAACAAGTCAG
TGACCCAGAAGACCGAGGCCTGGCTGGACAACTTCGCCCGCTGCTGGGACAACCTGGTGCAGAAGCTGGAAAAGA
GCACCGCCCAGATCAGCCAGGCAGTGACTACCACACAGCCCTCCCTGACACAGACTACTGTGATGGAGACCGTGA
CAACAGTGACCACAAGGGAGCAGATCCTGGTGAAGCACGCCCAGGAAGAACTGCCCCCTCCACCCCCTCAGAAGA
AGAGAACTCTGGAAAGACTGCAGGAGCTGCAGGAGGCCACTGACGAGCTGGACCTGAAGCTGCGGCAGGCCGAGG
TGATTAAGGGCAGCTGGCAGCCTGTGGGCGATCTGCTGATCGACAGCCTGCAGGACCACCTGGAGAAGGTGAAAG
CCCTGCGGGGCGAGATCGCCCCTCTGAAGGAGAACGTCAGCCATGTGAATGACCTGGCCAGACAGCTGACCACAC
TGGGGATTCAGCTGTCTCCTTACAATCTGTCAACCCTGGAGGACCTGAACACTCGCTGGAAGCTGCTGCAGGTGG
CCGTGGAGGACAGGGTGCGGCAGCTGCACGAAGCCCATCGCGACTTTGGGCCCGCCTCTCAGCACTTTCTGAGCA
CCTCCGTGCAGGGACCCTGGGAGCGGGCAATCAGCCCAAACAAGGTGCCATACTACATCAACCACGAGACCCAGA
CCACCTGTTGGGATCACCCCAAGATGACAGAGCTGTACCAGTCTCTGGCTGACCTGAACAACGTGCGGTTCTCAG
CCTACAGGACCGCCATGAAGCTGCGGAGACTGCAGAAGGCCCTGTGCCTGGATCTGCTGAGCCTCTCCGCTGCTT
GTGACGCCCTGGATCAGCACAACCTGAAACAGAACGACCAGCCAATGGACATCCTGCAGATTATTAATTGCCTGA
CAACCATCTATGATCGGCTGGAACAGGAGCACAATAATCTGGTGAACGTGCCACTGTGCGTGGACATGTGCCTGA
ATTGGCTGCTGAACGTGTACGACACAGGACGGACCGGCAGAATCAGAGTGCTGTCTTTTAAGACCGGGATCATCA
GCCTGTGCAAAGCCCACCTGGAGGACAAGTACCGGTATCTGTTCAAACAAGTGGCCTCCAGCACCGGCTTTTGCG
ACCAGCGCAGGCTGGGCCTGCTGCTCCACGACTCCATCCAGATCCCTAGACAGCTGGGCGAGGTGGCTTCTTTTG
GCGGATCCAATATCGAGCCCAGTGTGCGGAGCTGTTTTCAGTTTGCTAATAATAAGCCTGAGATCGAGGCCGCTC
TGTTCCTGGACTGGATGAGACTGGAGCCCCAGTCCATGGTGTGGCTGCCAGTGCTGCACAGGGTCGCCGCCGCAG
AGACTGCCAAGCACCAGGCCAAGTGCAACATCTGCAAAGAATGCCCAATCATTGGCTTTAGATACCGGAGCCTCA
AACACTTTAACTACGACATCTGCCAGAGCTGCTTCTTCTCCGGCCGGGTGGCCAAGGGCCACAAGATGCACTACC
CCATGGTGGAGTACTGTACCCCAACCACTTCCGGCGAGGACGTGAGAGATTTCGCCAAGGTGCTGAAGAACAAGT
TCCGGACAAAGAGATACTTTGCAAAACACCCAAGAATGGGCTACCTGCCAGTGCAGACCGTGCTGGAGGGGGACA
ATATGGAGACAGACACAATGTGATAGATTCCGGCCTGATTCACAACACCAGCTAGATCAGCGGCCTGATTCACAA
CACCAGCTAGACGCAGGAATAAAATATCTTTATTTTCATTACATCTGTGTGTTGGTTTTTTGTGTGAGGAACCCC
TAGTGATGGAGTTGGCCACTCCCTCTCTGCGCGCTCGCTCGCTCACTGAGGCCGGGCGACCAAAGGTCGCCCGAC
GCCCGGGCTTTGCCCGGGCGGCCTCAGTGAGCGAGCGAGCGCGC

| Nucleic acid | |
|---|---|
| cargo 24 | |
| annotated | Sequence |
| AAV2 ITR | GCGCGCTCGCTCGCTCACTGAGGCCGCCCGGGCAAAGCCCGGGCGTCGGGCGACCT |
| | TTGGTCGCCCGGCCTCAGTGAGCGAGCGAGCGCGCAGAGAGGGAGTGGCCAACTCC |
| | ATCACTAGGGGTTCCT (SEQ ID NO: 2408) |
| Novel promoter | CGTCTGTCTAATTCCAGCCAAGGGCATGGGGGAAAGGACAGAGCCCAGGGACCTGT |
| | GGCCTATTCTCTGAGAGGACGCTGGGCTAATAATAGGAGGGGAGATTAGGGAGGGA |
| | TTTGACTGCATTGTTATCTCACAGGAATGGCGTTTGAGAGCCTTGCTTCCAAGCTC |
| | TTCCAAGAGTCATGCCACCCCCCTCCAATCTCTGTGGAAGTGCCCACTGCCTTTCC |
| | CGCTTCGTTCTCTTCTCTCGGTCCCATCCCTGACCCACTAGCCTGGTGCCGGGGGG |
| | AGACCAATTTCTGGAGGAAGCTCTGGGTACCCAGTCTTGCCCTAAGCCTGCCTCTG |
| | AACAGGCTGTTCTTGTTTATGACCCCCGTCCCAGCAGAATAGTGATTGCTCATCCC |
| | TGCATGTGATTTGAGAGGGCCAGTCTTTCAGGCCTGGAGGAAACTCAAGCCCCACC |
| | AGCCGCTTGGCATCGGAATGCTCAGCTGGTCCCCTCCTGGGGCTCATGTGACCAAG |
| | ATCTAGCTATAAATATCAGAGGGGCCTCAGACCAAGACAGAATTCGGGCACCAGGA |
| | GAAGGAAGCCAACAGGATCCGACCCGGTGTTTTGTGACAAAGGCAAGACCCCCAGG |
| | TCTACTTAGAGCAACGTTAGTAGAGGA (SEQ ID NO: 2404) |
| Intron | GTAAGTATCAAGGTTACAAGACAGGTTTAAGGAGACCAATAGAAACTGGGCTTGTC |
| | GAGACAGAGAAGACTCTTGCGTTTCTGATAGGCACCTATTGGTCTTACTGACATCC |
| | ACTTTGCCTTTCTCTCCACAG (SEQ ID NO: 2409) |
| Codon optimized | ATGCTGTGGTGGGAGGAGGTGGAGGATTGCTACGAGAGAGAGGACGTGCAGAAGAA |
| microdystrophin | AACCTTCACCAAATGGGTGAACGCCCAGTTCAGCAAGTTTGGCAAGCAGCACATCG |
| coding sequence | AGAACCTGTTCAGCGATCTGCAGGACGGCCGCAGGCTGCTGGATCTGCTGGAGGGT |
| | CTGACCGGCCAGAAACTGCCCAAAGAGAAGGGATCAACCAGGGTGCACGCCCTGAA |
| | TAATGTGAACAAGGCCCTGAGAGTGCTGCAAAATAATAATGTGGATCTGGTGAACA |
| | TCGGATCTACCGATATTGTGGACGGCAACCATAAGCTGACTCTGGGCCTGATCTGG |
| | AATATCATCCTGCACTGGCAGGTGAAAAATGTGATGAAAAACATCATGGCCGGGCT |
| | GCAGCAGACCAACTCTGAGAAGATCCTGCTGAGCTGGGTGAGGCAGTCTACAAGAA |
| | ATTACCCCCAGGTGAACGTGATCAATTTCACCACCAGCTGGTCCGACGGGCTGGCT |
| | CTGAATGCCCTGATTCACAGCCACCGGCCCGACCTGTTCGACTGGAATTCCGTGGT |
| | GTGCCAGCAGAGCGCCACACAGAGACTGGAGCACGCTTTCAATATCGCTCGGTATC |
| | AGCTGGGCATCGAGAAGCTGCTGGACCCCGAGGACGTGGACACTACTTACCCCGAT |
| | AAAAAGAGCATCCTGATGTATATCACCTCCCTGTTCCAAGTGCTGCCCCAGCAGGT |
| | CTCCATCGAGGCCATCCAGGAGGTGGAAATGCTGCCCCGGCCCCCAAAGGTGACAA |
| | AGGAAGAACACTTCCAGCTCCACCACCAGATGCACTACTCTCAGCAGATCACCGTG |
| | AGCCTGGCCCAGGGGTACGAGCGGACCTCTTCTCCAAAGCCCCGCTTCAAGAGCTA |
| | TGCCTATACCCAGGCCGCCTATGTGACCACCTCCGATCCCACCCGCTCACCCTTCC |
| | CTTCTCAACACCTGGAAGCCCCAGAGGACAAGTCCTTCGGCAGTTCTCTGATGGAG |
| | TCTGAGGTGAACCTGGATAGATATCAGACTGCCCTGGAGGAGGTGCTGTCTTGGCT |
| | GCTCTCCGCCGAGGACACCCTGCAGGCACAGGGCGAGATCTCCAACGATGTGGAGG |
| | TGGTGAAGGACCAGTTCCACACACACGAGGGCTATATGATGGACCTGACTGCCCAT |
| | CAGGGCAGAGTGGGCAATATCCTGCAGCTGGGTTCCAAACTGATAGGCACCGGAAA |
| | GCTGAGCGAAGACGAGGAGACCGAGGTGCAGGAGCAGATGAATCTGCTGAACTCCC |
| | GGTGGGAGTGCCTGCGAGTCGCCAGCATGGAAAAGCAGAGCAACCTGCACCGCGTG |
| | CTCATGGATCTGCAGAATCAGAAGCTGAAGGAGCTGAATGACTGGCTGACCAAGAC |
| | CGAAGAGCGCACCAGGAAGATGGAGGAGGAGCCACTGGGCCCCGATCTGGAGGACC |
| | TGAAAAGACAGGTGCAGCAGCATAAAGTGCTGCAGGAGGACCTGGAGCAGGAACAA |
| | GTGAGAGTGAATTCTCTGACACACATGGTGGTGGTGGTGGACGAGAGCAGCGGCGA |
| | CCACGCAACAGCCGCCCTGGAGGAGCAGCTGAAAGTGCTGGGAGACCGGTGGGCCA |
| | ACATTTGCCGGTGGACCGAGGACCGCTGGGTGCTGCTGCAGGACATTCTGCTGAAG |
| | TGGCAGCGGCTGACCGAAGAGCAGTGCCTGTTCTCCGCCTGGCTGAGCGAGAAGGA |
| | GGACGCCGTGAATAAGATCCACACCACCGGGTTCAAGGACCAGAATGAGATGCTGT |
| | CCAGCCTGCAGAAGCTGGCCGTGCTGAAGGCCGATCTGGAAAAGAAGAAGCAGAGC |
| | ATGGGAAAGCTGTATAGCCTGAAGCAGGACCTGCTGTCTACTCTGAAAAACAAGTC |
| | AGTGACCCAGAAGACCGAGGCCTGGCTGGACAACTTCGCCCGCTGCTGGGACAACC |
| | TGGTGCAGAAGCTGGAAAAGAGCACCGCCCAGATCAGCCAGGCAGTGACTACCACA |
| | CAGCCCTCCCTGACACAGACTACTGTGATGGAGACCGTGACAACAGTGACCACAAG |
| | GGAGCAGATCCTGGTGAAGCACGCCCAGGAAGAACTGCCCCCTCCACCCCCTCAGA |
| | AGAAGAGAACTCTGGAAAGACTGCAGGAGCTGCAGGAGGCCACTGACGAGCTGGAC |
| | CTGAAGCTGCGGCAGGCCGAGGTGATTAAGGGCAGCTGGCAGCCTGTGGGCGATCT |
| | GCTGATCGACAGCCTGCAGGACCACCTGGAGAAGGTGAAAGCCCTGCGGGGCGAGA |
| | TCGCCCCTCTGAAGGAGAACGTCAGCCATGTGAATGACCTGGCCAGACAGCTGACC |
| | ACACTGGGGATTCAGCTGTCTCCTTACAATCTGTCAACCCTGGAGGACCTGAACAC |
| | TCGCTGGAAGCTGCTGCAGGTGGCCGTGGAGGACAGGGTGCGGCAGCTGCACGAAG |
| | CCCATCGCGACTTTGGGCCCGCCTCTCAGCACTTTCTGAGCACCTCCGTGCAGGGA |
| | CCCTGGGAGCGGGCAATCAGCCCAAACAAGGTGCCATACTACATCAACCACGAGAC |
| | CCAGACCACCTGTTGGGATCACCCCAAGATGACAGAGCTGTACCAGTCTCTGGCTG |
| | ACCTGAACAACGTGCGGTTCTCAGCCTACAGGACCGCCATGAAGCTGCGGAGACTG |
| | CAGAAGGCCCTGTGCCTGGATCTGCTGAGCCTCTCCGCTGCTTGTGACGCCCTGGA |
| | TCAGCACAACCTGAAACAGAACGACCAGCCAATGGACATCCTGCAGATTATTAATT |
| | GCCTGACAACCATCTATGATCGGCTGGAACAGGAGCACAATAATCTGGTGAACGTG |
| | CCACTGTGCGTGGACATGTGCCTGAATTGGCTGCTGAACGTGTACGACACAGGACG |
| | GACCGGCAGAATCAGAGTGCTGTCTTTTAAGACCGGGATCATCAGCCTGTGCAAAG |
| | CCCACCTGGAGGACAAGTACCGGTATCTGTTCAAACAAGTGGCCTCCAGCACCGGC |
| | TTTTGCGACCAGCGCAGGCTGGGCCTGCTGCTCCACGACTCCATCCAGATCCCTAG |
| | ACAGCTGGGCGAGGTGGCTTCTTTTGGCGGATCCAATATCGAGCCCAGTGTGCGGA |
| | GCTGTTTTCAGTTTGCTAATAATAAGCCTGAGATCGAGGCCGCTCTGTTCCTGGAC |
| | TGGATGAGACTGGAGCCCCAGTCCATGGTGTGGCTGCCAGTGCTGCACAGGGTCGC |
| | CGCCGCAGAGACTGCCAAGCACCAGGCCAAGTGCAACATCTGCAAAGAATGCCCAA |
| | TCATTGGCTTTAGATACCGGAGCCTCAAACACTTTAACTACGACATCTGCCAGAGC |
| | TGCTTCTTCTCCGGCCGGGTGGCCAAGGGCCACAAGATGCACTACCCCATGGTGGA |
| | GTACTGTACCCCAACCACTTCCGGCGAGGACGTGAGAGATTTCGCCAAGGTGCTGA |
| | AGAACAAGTTCCGGACAAAGAGATACTTTGCAAAACACCCAAGAATGGGCTACCTG |
| | CCAGTGCAGACCGTGCTGGAGGGGGACAATATGGAGACAGACACAATGTGA |
| | (SEQ ID NO: 2407) |
| First DRG de- | CGGCCTGATTCACAACACCAGCT (SEQ ID NO: 2400) |
| targeting miRNA | |
| binding site | |
| Second DRG de- | CGGCCTGATTCACAACACCAGCT (SEQ ID NO: 2400) |
| targeting miRNA | |
| binding site | |
| Short polyA | AGGAATAAAATATCTTTATTTTCATTACATCTGTGTGTTGGTTTTTTGTGTG |
| | (SEQ ID NO: 2410) |
| AAV2 ITR | AGGAACCCCTAGTGATGGAGTTGGCCACTCCCTCTCTGCGCGCTCGCTCGCTCACT |
| | GAGGCCGGGCGACCAAAGGTCGCCCGACGCCCGGGCTTTGCCCGGGCGGCCTCAGT |
| | GAGCGAGCGAGCGCGC (SEQ ID NO: 2411) |

Nucleic acid 25
(SEQ ID NO: 2436)
GCGCGCTCGCTCGCTCACTGAGGCCGCCCGGGCAAAGCCCGGGCGTCGGGCGACCTTTGGTCGCCCGGCCTCAGT
GAGCGAGCGAGCGCGCAGAGAGGGAGTGGCCAACTCCATCACTAGGGGTTCCTTAGTTATTAATAGTAATCAATT
ACGGGGTCATTAGTTCATAGCCCATATATGGAGTTCCGCGTTACATAACTTACGGTAAATGGCCCGCCTGGCTGA
CCGCCCAACGACCCCCGCCCATTGACGTCAATAATGACGTATGTTCCCATAGTAACGCCAATAGGGACTTTCCAT
TGACGTCAATGGGTGGAGTATTTACGGTAAACTGCCCACTTGGCAGTACATCAAGTGTATCATATGCCAAGTACG
CCCCCTATTGACGTCAATGACGGTAAATGGCCCGCCTGGCATTATGCCCAGTACATGACCTTATGGGACTTTCCT
ACTTGGCAGTACATCTACGTATTAGTCATCGCTATTACCATGCTAGACTAGCATGCTGCCCATGTAAGGAGGCAA
GGCCTGGGGACACCCGAGATGCCTGGTTATAATTAACCCAGACATGTGGCTGCCCCCCCCCCCCAACACCTGCTG
CCTCTAAAAATAACCCTGCATGCCATGTTCCCGGCGAAGGGCCAGCTGTCCCCCGCCAGCTAGACTCAGCTCTCA
GGGGCCCCTCCCTGGGGACAGCCCCTCCTGGCTAGTCACACCCTGTAGGCTCCTCTATATAACCCAGGGGCACAG
GGGCTGCCCTCATTCTACCACCACCTCCACAGCACAGACAGACACTCAGGAGCCAGCCAGCCAGCCCAGGTACCT
GGGCAGGTAAGTATCAAGGTTACAAGACAGGTTTAAGGAGACCAATAGAAACTGGGCTTGTCGAGACAGAGAAGA
CTCTTGCGTTTCTGATAGGCACCTATTGGTCTTACTGACATCCACTTTGCCTTTCTCTCCACAGGTGTCCAGACT
AGTGCCACCATGCTGTGGTGGGAGGAGGTGGAGGATTGCTACGAGAGAGAGGACGTGCAGAAGAAAACCTTCACC
AAATGGGTGAACGCCCAGTTCAGCAAGTTTGGCAAGCAGCACATCGAGAACCTGTTCAGCGATCTGCAGGACGGC
CGCAGGCTGCTGGATCTGCTGGAGGGTCTGACCGGCCAGAAACTGCCCAAAGAGAAGGGATCAACCAGGGTGCAC
GCCCTGAATAATGTGAACAAGGCCCTGAGAGTGCTGCAAAATAATAATGTGGATCTGGTGAACATCGGATCTACC
GATATTGTGGACGGCAACCATAAGCTGACTCTGGGCCTGATCTGGAATATCATCCTGCACTGGCAGGTGAAAAAT
GTGATGAAAAACATCATGGCCGGGCTGCAGCAGACCAACTCTGAGAAGATCCTGCTGAGCTGGGTGAGGCAGTCT
ACAAGAAATTACCCCCAGGTGAACGTGATCAATTTCACCACCAGCTGGTCCGACGGGCTGGCTCTGAATGCCCTG
ATTCACAGCCACCGGCCCGACCTGTTCGACTGGAATTCCGTGGTGTGCCAGCAGAGCGCCACACAGAGACTGGAG
CACGCTTTCAATATCGCTCGGTATCAGCTGGGCATCGAGAAGCTGCTGGACCCCGAGGACGTGGACACTACTTAC
CCCGATAAAAAGAGCATCCTGATGTATATCACCTCCCTGTTCCAAGTGCTGCCCCAGCAGGTCTCCATCGAGGCC
ATCCAGGAGGTGGAAATGCTGCCCCGGCCCCCAAAGGTGACAAAGGAAGAACACTTCCAGCTCCACCACCAGATG
CACTACTCTCAGCAGATCACCGTGAGCCTGGCCCAGGGGTACGAGCGGACCTCTTCTCCAAAGCCCCGCTTCAAG
AGCTATGCCTATACCCAGGCCGCCTATGTGACCACCTCCGATCCCACCCGCTCACCCTTCCCTTCTCAACACCTG
GAAGCCCCAGAGGACAAGTCCTTCGGCAGTTCTCTGATGGAGTCTGAGGTGAACCTGGATAGATATCAGACTGCC
CTGGAGGAGGTGCTGTCTTGGCTGCTCTCCGCCGAGGACACCCTGCAGGCACAGGGCGAGATCTCCAACGATGTG
GAGGTGGTGAAGGACCAGTTCCACACACACGAGGGCTATATGATGGACCTGACTGCCCATCAGGGCAGAGTGGGC
AATATCCTGCAGCTGGGTTCCAAACTGATAGGCACCGGAAAGCTGAGCGAAGACGAGGAGACCGAGGTGCAGGAG
CAGATGAATCTGCTGAACTCCCGGTGGGAGTGCCTGCGAGTCGCCAGCATGGAAAAGCAGAGCAACCTGCACCGC
GTGCTCATGGATCTGCAGAATCAGAAGCTGAAGGAGCTGAATGACTGGCTGACCAAGACCGAAGAGCGCACCAGG
AAGATGGAGGAGGAGCCACTGGGCCCCGATCTGGAGGACCTGAAAAGACAGGTGCAGCAGCATAAAGTGCTGCAG
GAGGACCTGGAGCAGGAACAAGTGAGAGTGAATTCTCTGACACACATGGTGGTGGTGGTGGACGAGAGCAGCGGC
GACCACGCAACAGCCGCCCTGGAGGAGCAGCTGAAAGTGCTGGGAGACCGGTGGGCCAACATTTGCCGGTGGACC
GAGGACCGCTGGGTGCTGCTGCAGGACATTCTGCTGAAGTGGCAGCGGCTGACCGAAGAGCAGTGCCTGTTCTCC
GCCTGGCTGAGCGAGAAGGAGGACGCCGTGAATAAGATCCACACCACCGGGTTCAAGGACCAGAATGAGATGCTG
TCCAGCCTGCAGAAGCTGGCCGTGCTGAAGGCCGATCTGGAAAAGAAGAAGCAGAGCATGGGAAAGCTGTATAGC
CTGAAGCAGGACCTGCTGTCTACTCTGAAAAACAAGTCAGTGACCCAGAAGACCGAGGCCTGGCTGGACAACTTC
GCCCGCTGCTGGGACAACCTGGTGCAGAAGCTGGAAAAGAGCACCGCCCAGATCAGCCAGGCAGTGACTACCACA
CAGCCCTCCCTGACACAGACTACTGTGATGGAGACCGTGACAACAGTGACCACAAGGGAGCAGATCCTGGTGAAG
CACGCCCAGGAAGAACTGCCCCCTCCACCCCCTCAGAAGAAGAGAACTCTGGAAAGACTGCAGGAGCTGCAGGAG
GCCACTGACGAGCTGGACCTGAAGCTGCGGCAGGCCGAGGTGATTAAGGGCAGCTGGCAGCCTGTGGGCGATCTG
CTGATCGACAGCCTGCAGGACCACCTGGAGAAGGTGAAAGCCCTGCGGGGCGAGATCGCCCCTCTGAAGGAGAAC
GTCAGCCATGTGAATGACCTGGCCAGACAGCTGACCACACTGGGGATTCAGCTGTCTCCTTACAATCTGTCAACC
CTGGAGGACCTGAACACTCGCTGGAAGCTGCTGCAGGTGGCCGTGGAGGACAGGGTGCGGCAGCTGCACGAAGCC
CATCGCGACTTTGGGCCCGCCTCTCAGCACTTTCTGAGCACCTCCGTGCAGGGACCCTGGGAGCGGGCAATCAGC
CCAAACAAGGTGCCATACTACATCAACCACGAGACCCAGACCACCTGTTGGGATCACCCCAAGATGACAGAGCTG
TACCAGTCTCTGGCTGACCTGAACAACGTGCGGTTCTCAGCCTACAGGACCGCCATGAAGCTGCGGAGACTGCAG
AAGGCCCTGTGCCTGGATCTGCTGAGCCTCTCCGCTGCTTGTGACGCCCTGGATCAGCACAACCTGAAACAGAAC
GACCAGCCAATGGACATCCTGCAGATTATTAATTGCCTGACAACCATCTATGATCGGCTGGAACAGGAGCACAAT
AATCTGGTGAACGTGCCACTGTGCGTGGACATGTGCCTGAATTGGCTGCTGAACGTGTACGACACAGGACGGACC
GGCAGAATCAGAGTGCTGTCTTTTAAGACCGGGATCATCAGCCTGTGCAAAGCCCACCTGGAGGACAAGTACCGG
TATCTGTTCAAACAAGTGGCCTCCAGCACCGGCTTTTGCGACCAGCGCAGGCTGGGCCTGCTGCTCCACGACTCC
ATCCAGATCCCTAGACAGCTGGGCGAGGTGGCTTCTTTTGGCGGATCCAATATCGAGCCCAGTGTGCGGAGCTGT
TTTCAGTTTGCTAATAATAAGCCTGAGATCGAGGCCGCTCTGTTCCTGGACTGGATGAGACTGGAGCCCCAGTCC
ATGGTGTGGCTGCCAGTGCTGCACAGGGTCGCCGCCGCAGAGACTGCCAAGCACCAGGCCAAGTGCAACATCTGC
AAAGAATGCCCAATCATTGGCTTTAGATACCGGAGCCTCAAACACTTTAACTACGACATCTGCCAGAGCTGCTTC
TTCTCCGGCCGGGTGGCCAAGGGCCACAAGATGCACTACCCCATGGTGGAGTACTGTACCCCAACCACTTCCGGC
GAGGACGTGAGAGATTTCGCCAAGGTGCTGAAGAACAAGTTCCGGACAAAGAGATACTTTGCAAAACACCCAAGA
ATGGGCTACCTGCCAGTGCAGACCGTGCTGGAGGGGGACAATATGGAGACAGACACAATGTGATAGATTCTCATA
CAGCTAGATAACCAAAGAAGATCAGTCATACAGCTAGATAACCAAAGAAGACGCAGGAATAAAATATCTTTATTT
TCATTACATCTGTGTGTTGGTTTTTTGTGTGAGGAACCCCTAGTGATGGAGTTGGCCACTCCCTCTCTGCGCGCT
CGCTCGCTCACTGAGGCCGGGCGACCAAAGGTCGCCCGACGCCCGGGCTTTGCCCGGGCGGCCTCAGTGAGCGAG
CGAGCGCGC

| Nucleic acid | |
|---|---|
| cargo 25 | |
| annotated | Sequence |
| AAV2 ITR | GCGCGCTCGCTCGCTCACTGAGGCCGCCCGGGCAAAGCCCGGGCGTCGGGCGACCT |
| | TTGGTCGCCCGGCCTCAGTGAGCGAGCGAGCGCGCAGAGAGGGAGTGGCCAACTCC |
| | ATCACTAGGGGTTCCT (SEQ ID NO: 2408) |
| Novel promoter | TAGTTATTAATAGTAATCAATTACGGGGTCATTAGTTCATAGCCCATATATGGAGT |
| | TCCGCGTTACATAACTTACGGTAAATGGCCCGCCTGGCTGACCGCCCAACGACCCC |
| | CGCCCATTGACGTCAATAATGACGTATGTTCCCATAGTAACGCCAATAGGGACTTT |
| | CCATTGACGTCAATGGGTGGAGTATTTACGGTAAACTGCCCACTTGGCAGTACATC |
| | AAGTGTATCATATGCCAAGTACGCCCCCTATTGACGTCAATGACGGTAAATGGCCC |
| | GCCTGGCATTATGCCCAGTACATGACCTTATGGGACTTTCCTACTTGGCAGTACAT |
| | CTACGTATTAGTCATCGCTATTACCATGCTAGACTAGCATGCTGCCCATGTAAGGA |
| | GGCAAGGCCTGGGGACACCCGAGATGCCTGGTTATAATTAACCCAGACATGTGGCT |
| | GCCCCCCCCCCCCAACACCTGCTGCCTCTAAAAATAACCCTGCATGCCATGTTCCC |
| | GGCGAAGGGCCAGCTGTCCCCCGCCAGCTAGACTCAGCTCTCAGGGGCCCCTCCCT |
| | GGGGACAGCCCCTCCTGGCTAGTCACACCCTGTAGGCTCCTCTATATAACCCAGGG |
| | GCACAGGGGCTGCCCTCATTCTACCACCACCTCCACAGCACAGACAGACACTCAGG |
| | AGCCAGCCAGC (SEQ ID NO: 2402) |
| Intron | GTAAGTATCAAGGTTACAAGACAGGTTTAAGGAGACCAATAGAAACTGGGCTTGTC |
| | GAGACAGAGAAGACTCTTGCGTTTCTGATAGGCACCTATTGGTCTTACTGACATCC |
| | ACTTTGCCTTTCTCTCCACAG (SEQ ID NO: 2409) |
| Codon optimized | ATGCTGTGGTGGGAGGAGGTGGAGGATTGCTACGAGAGAGAGGACGTGCAGAAGAA |
| microdystrophin | AACCTTCACCAAATGGGTGAACGCCCAGTTCAGCAAGTTTGGCAAGCAGCACATCG |
| coding sequence | AGAACCTGTTCAGCGATCTGCAGGACGGCCGCAGGCTGCTGGATCTGCTGGAGGGT |
| | CTGACCGGCCAGAAACTGCCCAAAGAGAAGGGATCAACCAGGGTGCACGCCCTGAA |
| | TAATGTGAACAAGGCCCTGAGAGTGCTGCAAAATAATAATGTGGATCTGGTGAACA |
| | TCGGATCTACCGATATTGTGGACGGCAACCATAAGCTGACTCTGGGCCTGATCTGG |
| | AATATCATCCTGCACTGGCAGGTGAAAAATGTGATGAAAAACATCATGGCCGGGCT |
| | GCAGCAGACCAACTCTGAGAAGATCCTGCTGAGCTGGGTGAGGCAGTCTACAAGAA |
| | ATTACCCCCAGGTGAACGTGATCAATTTCACCACCAGCTGGTCCGACGGGCTGGCT |
| | CTGAATGCCCTGATTCACAGCCACCGGCCCGACCTGTTCGACTGGAATTCCGTGGT |
| | GTGCCAGCAGAGCGCCACACAGAGACTGGAGCACGCTTTCAATATCGCTCGGTATC |
| | AGCTGGGCATCGAGAAGCTGCTGGACCCCGAGGACGTGGACACTACTTACCCCGAT |
| | AAAAAGAGCATCCTGATGTATATCACCTCCCTGTTCCAAGTGCTGCCCCAGCAGGT |
| | CTCCATCGAGGCCATCCAGGAGGTGGAAATGCTGCCCCGGCCCCCAAAGGTGACAA |
| | AGGAAGAACACTTCCAGCTCCACCACCAGATGCACTACTCTCAGCAGATCACCGTG |
| | AGCCTGGCCCAGGGGTACGAGCGGACCTCTTCTCCAAAGCCCCGCTTCAAGAGCTA |
| | TGCCTATACCCAGGCCGCCTATGTGACCACCTCCGATCCCACCCGCTCACCCTTCC |
| | CTTCTCAACACCTGGAAGCCCCAGAGGACAAGTCCTTCGGCAGTTCTCTGATGGAG |
| | TCTGAGGTGAACCTGGATAGATATCAGACTGCCCTGGAGGAGGTGCTGTCTTGGCT |
| | GCTCTCCGCCGAGGACACCCTGCAGGCACAGGGCGAGATCTCCAACGATGTGGAGG |
| | TGGTGAAGGACCAGTTCCACACACACGAGGGCTATATGATGGACCTGACTGCCCAT |
| | CAGGGCAGAGTGGGCAATATCCTGCAGCTGGGTTCCAAACTGATAGGCACCGGAAA |
| | GCTGAGCGAAGACGAGGAGACCGAGGTGCAGGAGCAGATGAATCTGCTGAACTCCC |
| | GGTGGGAGTGCCTGCGAGTCGCCAGCATGGAAAAGCAGAGCAACCTGCACCGCGTG |
| | CTCATGGATCTGCAGAATCAGAAGCTGAAGGAGCTGAATGACTGGCTGACCAAGAC |
| | CGAAGAGCGCACCAGGAAGATGGAGGAGGAGCCACTGGGCCCCGATCTGGAGGACC |
| | TGAAAAGACAGGTGCAGCAGCATAAAGTGCTGCAGGAGGACCTGGAGCAGGAACAA |
| | GTGAGAGTGAATTCTCTGACACACATGGTGGTGGTGGTGGACGAGAGCAGCGGCGA |
| | CCACGCAACAGCCGCCCTGGAGGAGCAGCTGAAAGTGCTGGGAGACCGGTGGGCCA |
| | ACATTTGCCGGTGGACCGAGGACCGCTGGGTGCTGCTGCAGGACATTCTGCTGAAG |
| | TGGCAGCGGCTGACCGAAGAGCAGTGCCTGTTCTCCGCCTGGCTGAGCGAGAAGGA |
| | GGACGCCGTGAATAAGATCCACACCACCGGGTTCAAGGACCAGAATGAGATGCTGT |
| | CCAGCCTGCAGAAGCTGGCCGTGCTGAAGGCCGATCTGGAAAAGAAGAAGCAGAGC |
| | ATGGGAAAGCTGTATAGCCTGAAGCAGGACCTGCTGTCTACTCTGAAAAACAAGTC |
| | AGTGACCCAGAAGACCGAGGCCTGGCTGGACAACTTCGCCCGCTGCTGGGACAACC |
| | TGGTGCAGAAGCTGGAAAAGAGCACCGCCCAGATCAGCCAGGCAGTGACTACCACA |
| | CAGCCCTCCCTGACACAGACTACTGTGATGGAGACCGTGACAACAGTGACCACAAG |
| | GGAGCAGATCCTGGTGAAGCACGCCCAGGAAGAACTGCCCCCTCCACCCCCTCAGA |
| | AGAAGAGAACTCTGGAAAGACTGCAGGAGCTGCAGGAGGCCACTGACGAGCTGGAC |
| | CTGAAGCTGCGGCAGGCCGAGGTGATTAAGGGCAGCTGGCAGCCTGTGGGCGATCT |
| | GCTGATCGACAGCCTGCAGGACCACCTGGAGAAGGTGAAAGCCCTGCGGGGCGAGA |
| | TCGCCCCTCTGAAGGAGAACGTCAGCCATGTGAATGACCTGGCCAGACAGCTGACC |
| | ACACTGGGGATTCAGCTGTCTCCTTACAATCTGTCAACCCTGGAGGACCTGAACAC |
| | TCGCTGGAAGCTGCTGCAGGTGGCCGTGGAGGACAGGGTGCGGCAGCTGCACGAAG |
| | CCCATCGCGACTTTGGGCCCGCCTCTCAGCACTTTCTGAGCACCTCCGTGCAGGGA |
| | CCCTGGGAGCGGGCAATCAGCCCAAACAAGGTGCCATACTACATCAACCACGAGAC |
| | CCAGACCACCTGTTGGGATCACCCCAAGATGACAGAGCTGTACCAGTCTCTGGCTG |
| | ACCTGAACAACGTGCGGTTCTCAGCCTACAGGACCGCCATGAAGCTGCGGAGACTG |
| | CAGAAGGCCCTGTGCCTGGATCTGCTGAGCCTCTCCGCTGCTTGTGACGCCCTGGA |
| | TCAGCACAACCTGAAACAGAACGACCAGCCAATGGACATCCTGCAGATTATTAATT |
| | GCCTGACAACCATCTATGATCGGCTGGAACAGGAGCACAATAATCTGGTGAACGTG |
| | CCACTGTGCGTGGACATGTGCCTGAATTGGCTGCTGAACGTGTACGACACAGGACG |
| | GACCGGCAGAATCAGAGTGCTGTCTTTTAAGACCGGGATCATCAGCCTGTGCAAAG |
| | CCCACCTGGAGGACAAGTACCGGTATCTGTTCAAACAAGTGGCCTCCAGCACCGGC |
| | TTTTGCGACCAGCGCAGGCTGGGCCTGCTGCTCCACGACTCCATCCAGATCCCTAG |
| | ACAGCTGGGCGAGGTGGCTTCTTTTGGCGGATCCAATATCGAGCCCAGTGTGCGGA |
| | GCTGTTTTCAGTTTGCTAATAATAAGCCTGAGATCGAGGCCGCTCTGTTCCTGGAC |
| | TGGATGAGACTGGAGCCCCAGTCCATGGTGTGGCTGCCAGTGCTGCACAGGGTCGC |
| | CGCCGCAGAGACTGCCAAGCACCAGGCCAAGTGCAACATCTGCAAAGAATGCCCAA |
| | TCATTGGCTTTAGATACCGGAGCCTCAAACACTTTAACTACGACATCTGCCAGAGC |
| | TGCTTCTTCTCCGGCCGGGTGGCCAAGGGCCACAAGATGCACTACCCCATGGTGGA |
| | GTACTGTACCCCAACCACTTCCGGCGAGGACGTGAGAGATTTCGCCAAGGTGCTGA |
| | AGAACAAGTTCCGGACAAAGAGATACTTTGCAAAACACCCAAGAATGGGCTACCTG |
| | CCAGTGCAGACCGTGCTGGAGGGGGACAATATGGAGACAGACACAATGTGA |
| | (SEQ ID NO: 2407) |
| First DRG de- | TCATACAGCTAGATAACCAAAGA (SEQ ID NO: 2401) |
| targeting miRNA | |
| binding site | |
| Second DRG de- | TCATACAGCTAGATAACCAAAGA (SEQ ID NO: 2401) |
| targeting miRNA | |
| binding site | |
| Short polyA | AGGAATAAAATATCTTTATTTTCATTACATCTGTGTGTTGGTTTTTTGTGTG |
| | (SEQ ID NO: 2410) |
| AAV2 ITR | AGGAACCCCTAGTGATGGAGTTGGCCACTCCCTCTCTGCGCGCTCGCTCGCTCACT |
| | GAGGCCGGGCGACCAAAGGTCGCCCGACGCCCGGGCTTTGCCCGGGCGGCCTCAGT |
| | GAGCGAGCGAGCGCGC (SEQ ID NO: 2411) |

Nucleic acid 26
(SEQ ID NO: 2437)
GCGCGCTCGCTCGCTCACTGAGGCCGCCCGGGCAAAGCCCGGGCGTCGGGCGACCTTTGGTCGCCCGGCCTCAGT
GAGCGAGCGAGCGCGCAGAGAGGGAGTGGCCAACTCCATCACTAGGGGTTCCTCGTCTGTCTAATTCCAGCCAAG
GGCATGGGGGAAAGGACAGAGCCCAGGGACCTGTGGCCTATTCTCTGAGAGGACGCTGGGCTAATAATAGGAGGG
GAGATTAGGGAGGGATTTGACTGCATTGTTATCTCACAGGAATGGCGTTTGAGAGCCTTGCTTCCAAGCTCTTCC
AAGAGTCATGCCACCCCCCTCCAATCTCTGTGGAAGTGCCCACTGCCTTTCCCGCTTCGTTCTCTTCTCTCTAAA
TCTGAGCCCACCCCACTCAGGGGTACAGGATCTGGTTCATTTATCTCCCAGAATGATGCCTTGGGTTGCGTCCCC
TCTAAACTCTGGCACATTCCAGCCCCTCTTTGGGAGAAAGAACATCTCTTCTTGCCCAGGCCCTAGTGAGACATG
CATCGCAAGACATGCTCCCCCCTTCCTCCCCGCTGGGCTCCAGCTGCTGCCAGCCCTCCAAGAAAGGAGAGGCCC
TGAGTTGGGCTATTTTGGTATCTGGGGTGGGCACCCGCAGGGCTAAGGTTACCTTGGTATGTTAAGGGCTCCCTG
GGGCAGGACTATATAACCCCAGAGGGACTGCCCCATGCTGACTCCTTGCTTCTTTCCTGCTCGAGCCGCTGCCTT
GCCCCCCGGAGACTGAAGACACAGCCCAGGTACCTGGGCAGGTAAGTATCAAGGTTACAAGACAGGTTTAAGGAG
ACCAATAGAAACTGGGCTTGTCGAGACAGAGAAGACTCTTGCGTTTCTGATAGGCACCTATTGGTCTTACTGACA
TCCACTTTGCCTTTCTCTCCACAGGTGTCCAGACTAGTGCCACCATGCTGTGGTGGGAGGAGGTGGAGGATTGCT
ACGAGAGAGAGGACGTGCAGAAGAAAACCTTCACCAAATGGGTGAACGCCCAGTTCAGCAAGTTTGGCAAGCAGC
ACATCGAGAACCTGTTCAGCGATCTGCAGGACGGCCGCAGGCTGCTGGATCTGCTGGAGGGTCTGACCGGCCAGA
AACTGCCCAAAGAGAAGGGATCAACCAGGGTGCACGCCCTGAATAATGTGAACAAGGCCCTGAGAGTGCTGCAAA
ATAATAATGTGGATCTGGTGAACATCGGATCTACCGATATTGTGGACGGCAACCATAAGCTGACTCTGGGCCTGA
TCTGGAATATCATCCTGCACTGGCAGGTGAAAAATGTGATGAAAAACATCATGGCCGGGCTGCAGCAGACCAACT
CTGAGAAGATCCTGCTGAGCTGGGTGAGGCAGTCTACAAGAAATTACCCCCAGGTGAACGTGATCAATTTCACCA
CCAGCTGGTCCGACGGGCTGGCTCTGAATGCCCTGATTCACAGCCACCGGCCCGACCTGTTCGACTGGAATTCCG
TGGTGTGCCAGCAGAGCGCCACACAGAGACTGGAGCACGCTTTCAATATCGCTCGGTATCAGCTGGGCATCGAGA
AGCTGCTGGACCCCGAGGACGTGGACACTACTTACCCCGATAAAAAGAGCATCCTGATGTATATCACCTCCCTGT
TCCAAGTGCTGCCCCAGCAGGTCTCCATCGAGGCCATCCAGGAGGTGGAAATGCTGCCCCGGCCCCCAAAGGTGA
CAAAGGAAGAACACTTCCAGCTCCACCACCAGATGCACTACTCTCAGCAGATCACCGTGAGCCTGGCCCAGGGGT
ACGAGCGGACCTCTTCTCCAAAGCCCCGCTTCAAGAGCTATGCCTATACCCAGGCCGCCTATGTGACCACCTCCG
ATCCCACCCGCTCACCCTTCCCTTCTCAACACCTGGAAGCCCCAGAGGACAAGTCCTTCGGCAGTTCTCTGATGG
AGTCTGAGGTGAACCTGGATAGATATCAGACTGCCCTGGAGGAGGTGCTGTCTTGGCTGCTCTCCGCCGAGGACA
CCCTGCAGGCACAGGGCGAGATCTCCAACGATGTGGAGGTGGTGAAGGACCAGTTCCACACACACGAGGGCTATA
TGATGGACCTGACTGCCCATCAGGGCAGAGTGGGCAATATCCTGCAGCTGGGTTCCAAACTGATAGGCACCGGAA
AGCTGAGCGAAGACGAGGAGACCGAGGTGCAGGAGCAGATGAATCTGCTGAACTCCCGGTGGGAGTGCCTGCGAG
TCGCCAGCATGGAAAAGCAGAGCAACCTGCACCGCGTGCTCATGGATCTGCAGAATCAGAAGCTGAAGGAGCTGA
ATGACTGGCTGACCAAGACCGAAGAGCGCACCAGGAAGATGGAGGAGGAGCCACTGGGCCCCGATCTGGAGGACC
TGAAAAGACAGGTGCAGCAGCATAAAGTGCTGCAGGAGGACCTGGAGCAGGAACAAGTGAGAGTGAATTCTCTGA
CACACATGGTGGTGGTGGTGGACGAGAGCAGCGGCGACCACGCAACAGCCGCCCTGGAGGAGCAGCTGAAAGTGC
TGGGAGACCGGTGGGCCAACATTTGCCGGTGGACCGAGGACCGCTGGGTGCTGCTGCAGGACATTCTGCTGAAGT
GGCAGCGGCTGACCGAAGAGCAGTGCCTGTTCTCCGCCTGGCTGAGCGAGAAGGAGGACGCCGTGAATAAGATCC
ACACCACCGGGTTCAAGGACCAGAATGAGATGCTGTCCAGCCTGCAGAAGCTGGCCGTGCTGAAGGCCGATCTGG
AAAAGAAGAAGCAGAGCATGGGAAAGCTGTATAGCCTGAAGCAGGACCTGCTGTCTACTCTGAAAAACAAGTCAG
TGACCCAGAAGACCGAGGCCTGGCTGGACAACTTCGCCCGCTGCTGGGACAACCTGGTGCAGAAGCTGGAAAAGA
GCACCGCCCAGATCAGCCAGGCAGTGACTACCACACAGCCCTCCCTGACACAGACTACTGTGATGGAGACCGTGA
CAACAGTGACCACAAGGGAGCAGATCCTGGTGAAGCACGCCCAGGAAGAACTGCCCCCTCCACCCCCTCAGAAGA
AGAGAACTCTGGAAAGACTGCAGGAGCTGCAGGAGGCCACTGACGAGCTGGACCTGAAGCTGCGGCAGGCCGAGG
TGATTAAGGGCAGCTGGCAGCCTGTGGGCGATCTGCTGATCGACAGCCTGCAGGACCACCTGGAGAAGGTGAAAG
CCCTGCGGGGCGAGATCGCCCCTCTGAAGGAGAACGTCAGCCATGTGAATGACCTGGCCAGACAGCTGACCACAC
TGGGGATTCAGCTGTCTCCTTACAATCTGTCAACCCTGGAGGACCTGAACACTCGCTGGAAGCTGCTGCAGGTGG
CCGTGGAGGACAGGGTGCGGCAGCTGCACGAAGCCCATCGCGACTTTGGGCCCGCCTCTCAGCACTTTCTGAGCA
CCTCCGTGCAGGGACCCTGGGAGCGGGCAATCAGCCCAAACAAGGTGCCATACTACATCAACCACGAGACCCAGA
CCACCTGTTGGGATCACCCCAAGATGACAGAGCTGTACCAGTCTCTGGCTGACCTGAACAACGTGCGGTTCTCAG
CCTACAGGACCGCCATGAAGCTGCGGAGACTGCAGAAGGCCCTGTGCCTGGATCTGCTGAGCCTCTCCGCTGCTT
GTGACGCCCTGGATCAGCACAACCTGAAACAGAACGACCAGCCAATGGACATCCTGCAGATTATTAATTGCCTGA
CAACCATCTATGATCGGCTGGAACAGGAGCACAATAATCTGGTGAACGTGCCACTGTGCGTGGACATGTGCCTGA
ATTGGCTGCTGAACGTGTACGACACAGGACGGACCGGCAGAATCAGAGTGCTGTCTTTTAAGACCGGGATCATCA
GCCTGTGCAAAGCCCACCTGGAGGACAAGTACCGGTATCTGTTCAAACAAGTGGCCTCCAGCACCGGCTTTTGCG
ACCAGCGCAGGCTGGGCCTGCTGCTCCACGACTCCATCCAGATCCCTAGACAGCTGGGCGAGGTGGCTTCTTTTG
GCGGATCCAATATCGAGCCCAGTGTGCGGAGCTGTTTTCAGTTTGCTAATAATAAGCCTGAGATCGAGGCCGCTC
TGTTCCTGGACTGGATGAGACTGGAGCCCCAGTCCATGGTGTGGCTGCCAGTGCTGCACAGGGTCGCCGCCGCAG
AGACTGCCAAGCACCAGGCCAAGTGCAACATCTGCAAAGAATGCCCAATCATTGGCTTTAGATACCGGAGCCTCA
AACACTTTAACTACGACATCTGCCAGAGCTGCTTCTTCTCCGGCCGGGTGGCCAAGGGCCACAAGATGCACTACC
CCATGGTGGAGTACTGTACCCCAACCACTTCCGGCGAGGACGTGAGAGATTTCGCCAAGGTGCTGAAGAACAAGT
TCCGGACAAAGAGATACTTTGCAAAACACCCAAGAATGGGCTACCTGCCAGTGCAGACCGTGCTGGAGGGGGACA
ATATGGAGACAGACACAATGTGATAGATTCTCATACAGCTAGATAACCAAAGAAGATCAGTCATACAGCTAGATA
ACCAAAGAAGACGCAGGAATAAAATATCTTTATTTTCATTACATCTGTGTGTTGGTTTTTTGTGTGAGGAACCCC
TAGTGATGGAGTTGGCCACTCCCTCTCTGCGCGCTCGCTCGCTCACTGAGGCCGGGCGACCAAAGGTCGCCCGAC
GCCCGGGCTTTGCCCGGGCGGCCTCAGTGAGCGAGCGAGCGCGC

| Nucleic acid | |
|---|---|
| cargo 26 | |
| annotated | Sequence |
| AAV2 ITR | GCGCGCTCGCTCGCTCACTGAGGCCGCCCGGGCAAAGCCCGGGCGTCGGGCGACCT |
| | TTGGTCGCCCGGCCTCAGTGAGCGAGCGAGCGCGCAGAGAGGGAGTGGCCAACTCC |
| | ATCACTAGGGGTTCCT (SEQ ID NO: 2408) |
| Novel promoter | CGTCTGTCTAATTCCAGCCAAGGGCATGGGGGAAAGGACAGAGCCCAGGGACCTGT |
| | GGCCTATTCTCTGAGAGGACGCTGGGCTAATAATAGGAGGGGAGATTAGGGAGGGA |
| | TTTGACTGCATTGTTATCTCACAGGAATGGCGTTTGAGAGCCTTGCTTCCAAGCTC |
| | TTCCAAGAGTCATGCCACCCCCCTCCAATCTCTGTGGAAGTGCCCACTGCCTTTCC |
| | CGCTTCGTTCTCTTCTCTCTAAATCTGAGCCCACCCCACTCAGGGGTACAGGATCT |
| | GGTTCATTTATCTCCCAGAATGATGCCTTGGGTTGCGTCCCCTCTAAACTCTGGCA |
| | CATTCCAGCCCCTCTTTGGGAGAAAGAACATCTCTTCTTGCCCAGGCCCTAGTGAG |
| | ACATGCATCGCAAGACATGCTCCCCCCTTCCTCCCCGCTGGGCTCCAGCTGCTGCC |
| | AGCCCTCCAAGAAAGGAGAGGCCCTGAGTTGGGCTATTTTGGTATCTGGGGTGGGC |
| | ACCCGCAGGGCTAAGGTTACCTTGGTATGTTAAGGGCTCCCTGGGGCAGGACTATA |
| | TAACCCCAGAGGGACTGCCCCATGCTGACTCCTTGCTTCTTTCCTGCTCGAGCCGC |
| | TGCCTTGCCCCCCGGAGACTGAAGACA (SEQ ID NO: 2403) |
| Intron | GTAAGTATCAAGGTTACAAGACAGGTTTAAGGAGACCAATAGAAACTGGGCTTGTC |
| | GAGACAGAGAAGACTCTTGCGTTTCTGATAGGCACCTATTGGTCTTACTGACATCC |
| | ACTTTGCCTTTCTCTCCACAG (SEQ ID NO: 2409) |
| Codon optimized | ATGCTGTGGTGGGAGGAGGTGGAGGATTGCTACGAGAGAGAGGACGTGCAGAAGAA |
| microdystrophin | AACCTTCACCAAATGGGTGAACGCCCAGTTCAGCAAGTTTGGCAAGCAGCACATCG |
| coding sequence | AGAACCTGTTCAGCGATCTGCAGGACGGCCGCAGGCTGCTGGATCTGCTGGAGGGT |
| | CTGACCGGCCAGAAACTGCCCAAAGAGAAGGGATCAACCAGGGTGCACGCCCTGAA |
| | TAATGTGAACAAGGCCCTGAGAGTGCTGCAAAATAATAATGTGGATCTGGTGAACA |
| | TCGGATCTACCGATATTGTGGACGGCAACCATAAGCTGACTCTGGGCCTGATCTGG |
| | AATATCATCCTGCACTGGCAGGTGAAAAATGTGATGAAAAACATCATGGCCGGGCT |
| | GCAGCAGACCAACTCTGAGAAGATCCTGCTGAGCTGGGTGAGGCAGTCTACAAGAA |
| | ATTACCCCCAGGTGAACGTGATCAATTTCACCACCAGCTGGTCCGACGGGCTGGCT |
| | CTGAATGCCCTGATTCACAGCCACCGGCCCGACCTGTTCGACTGGAATTCCGTGGT |
| | GTGCCAGCAGAGCGCCACACAGAGACTGGAGCACGCTTTCAATATCGCTCGGTATC |
| | AGCTGGGCATCGAGAAGCTGCTGGACCCCGAGGACGTGGACACTACTTACCCCGAT |
| | AAAAAGAGCATCCTGATGTATATCACCTCCCTGTTCCAAGTGCTGCCCCAGCAGGT |
| | CTCCATCGAGGCCATCCAGGAGGTGGAAATGCTGCCCCGGCCCCCAAAGGTGACAA |
| | AGGAAGAACACTTCCAGCTCCACCACCAGATGCACTACTCTCAGCAGATCACCGTG |
| | AGCCTGGCCCAGGGGTACGAGCGGACCTCTTCTCCAAAGCCCCGCTTCAAGAGCTA |
| | TGCCTATACCCAGGCCGCCTATGTGACCACCTCCGATCCCACCCGCTCACCCTTCC |
| | CTTCTCAACACCTGGAAGCCCCAGAGGACAAGTCCTTCGGCAGTTCTCTGATGGAG |
| | TCTGAGGTGAACCTGGATAGATATCAGACTGCCCTGGAGGAGGTGCTGTCTTGGCT |
| | GCTCTCCGCCGAGGACACCCTGCAGGCACAGGGCGAGATCTCCAACGATGTGGAGG |
| | TGGTGAAGGACCAGTTCCACACACACGAGGGCTATATGATGGACCTGACTGCCCAT |
| | CAGGGCAGAGTGGGCAATATCCTGCAGCTGGGTTCCAAACTGATAGGCACCGGAAA |
| | GCTGAGCGAAGACGAGGAGACCGAGGTGCAGGAGCAGATGAATCTGCTGAACTCCC |
| | GGTGGGAGTGCCTGCGAGTCGCCAGCATGGAAAAGCAGAGCAACCTGCACCGCGTG |
| | CTCATGGATCTGCAGAATCAGAAGCTGAAGGAGCTGAATGACTGGCTGACCAAGAC |
| | CGAAGAGCGCACCAGGAAGATGGAGGAGGAGCCACTGGGCCCCGATCTGGAGGACC |
| | TGAAAAGACAGGTGCAGCAGCATAAAGTGCTGCAGGAGGACCTGGAGCAGGAACAA |
| | GTGAGAGTGAATTCTCTGACACACATGGTGGTGGTGGTGGACGAGAGCAGCGGCGA |
| | CCACGCAACAGCCGCCCTGGAGGAGCAGCTGAAAGTGCTGGGAGACCGGTGGGCCA |
| | ACATTTGCCGGTGGACCGAGGACCGCTGGGTGCTGCTGCAGGACATTCTGCTGAAG |
| | TGGCAGCGGCTGACCGAAGAGCAGTGCCTGTTCTCCGCCTGGCTGAGCGAGAAGGA |
| | GGACGCCGTGAATAAGATCCACACCACCGGGTTCAAGGACCAGAATGAGATGCTGT |
| | CCAGCCTGCAGAAGCTGGCCGTGCTGAAGGCCGATCTGGAAAAGAAGAAGCAGAGC |
| | ATGGGAAAGCTGTATAGCCTGAAGCAGGACCTGCTGTCTACTCTGAAAAACAAGTC |
| | AGTGACCCAGAAGACCGAGGCCTGGCTGGACAACTTCGCCCGCTGCTGGGACAACC |
| | TGGTGCAGAAGCTGGAAAAGAGCACCGCCCAGATCAGCCAGGCAGTGACTACCACA |
| | CAGCCCTCCCTGACACAGACTACTGTGATGGAGACCGTGACAACAGTGACCACAAG |
| | GGAGCAGATCCTGGTGAAGCACGCCCAGGAAGAACTGCCCCCTCCACCCCCTCAGA |
| | AGAAGAGAACTCTGGAAAGACTGCAGGAGCTGCAGGAGGCCACTGACGAGCTGGAC |
| | CTGAAGCTGCGGCAGGCCGAGGTGATTAAGGGCAGCTGGCAGCCTGTGGGCGATCT |
| | GCTGATCGACAGCCTGCAGGACCACCTGGAGAAGGTGAAAGCCCTGCGGGGCGAGA |
| | TCGCCCCTCTGAAGGAGAACGTCAGCCATGTGAATGACCTGGCCAGACAGCTGACC |
| | ACACTGGGGATTCAGCTGTCTCCTTACAATCTGTCAACCCTGGAGGACCTGAACAC |
| | TCGCTGGAAGCTGCTGCAGGTGGCCGTGGAGGACAGGGTGCGGCAGCTGCACGAAG |
| | CCCATCGCGACTTTGGGCCCGCCTCTCAGCACTTTCTGAGCACCTCCGTGCAGGGA |
| | CCCTGGGAGCGGGCAATCAGCCCAAACAAGGTGCCATACTACATCAACCACGAGAC |
| | CCAGACCACCTGTTGGGATCACCCCAAGATGACAGAGCTGTACCAGTCTCTGGCTG |
| | ACCTGAACAACGTGCGGTTCTCAGCCTACAGGACCGCCATGAAGCTGCGGAGACTG |
| | CAGAAGGCCCTGTGCCTGGATCTGCTGAGCCTCTCCGCTGCTTGTGACGCCCTGGA |
| | TCAGCACAACCTGAAACAGAACGACCAGCCAATGGACATCCTGCAGATTATTAATT |
| | GCCTGACAACCATCTATGATCGGCTGGAACAGGAGCACAATAATCTGGTGAACGTG |
| | CCACTGTGCGTGGACATGTGCCTGAATTGGCTGCTGAACGTGTACGACACAGGACG |
| | GACCGGCAGAATCAGAGTGCTGTCTTTTAAGACCGGGATCATCAGCCTGTGCAAAG |
| | CCCACCTGGAGGACAAGTACCGGTATCTGTTCAAACAAGTGGCCTCCAGCACCGGC |
| | TTTTGCGACCAGCGCAGGCTGGGCCTGCTGCTCCACGACTCCATCCAGATCCCTAG |
| | ACAGCTGGGCGAGGTGGCTTCTTTTGGCGGATCCAATATCGAGCCCAGTGTGCGGA |
| | GCTGTTTTCAGTTTGCTAATAATAAGCCTGAGATCGAGGCCGCTCTGTTCCTGGAC |
| | TGGATGAGACTGGAGCCCCAGTCCATGGTGTGGCTGCCAGTGCTGCACAGGGTCGC |
| | CGCCGCAGAGACTGCCAAGCACCAGGCCAAGTGCAACATCTGCAAAGAATGCCCAA |
| | TCATTGGCTTTAGATACCGGAGCCTCAAACACTTTAACTACGACATCTGCCAGAGC |
| | TGCTTCTTCTCCGGCCGGGTGGCCAAGGGCCACAAGATGCACTACCCCATGGTGGA |
| | GTACTGTACCCCAACCACTTCCGGCGAGGACGTGAGAGATTTCGCCAAGGTGCTGA |
| | AGAACAAGTTCCGGACAAAGAGATACTTTGCAAAACACCCAAGAATGGGCTACCTG |
| | CCAGTGCAGACCGTGCTGGAGGGGGACAATATGGAGACAGACACAATGTGA |
| | (SEQ ID NO: 2407) |
| First DRG de- | TCATACAGCTAGATAACCAAAGA (SEQ ID NO: 2401) |
| targeting miRNA | |
| binding site | |
| Second DRG de- | TCATACAGCTAGATAACCAAAGA (SEQ ID NO: 2401) |
| targeting miRNA | |
| binding site | |
| Short polyA | AGGAATAAAATATCTTTATTTTCATTACATCTGTGTGTTGGTTTTTTGTGTG |
| | (SEQ ID NO: 2410) |
| AAV2 ITR | AGGAACCCCTAGTGATGGAGTTGGCCACTCCCTCTCTGCGCGCTCGCTCGCTCACT |
| | GAGGCCGGGCGACCAAAGGTCGCCCGACGCCCGGGCTTTGCCCGGGCGGCCTCAGT |
| | GAGCGAGCGAGCGCGC (SEQ ID NO: 2411) |

Nucleic acid 27
(SEQ ID NO: 2438)
GCGCGCTCGCTCGCTCACTGAGGCCGCCCGGGCAAAGCCCGGGCGTCGGGCGACCTTTGGTCGCCCGGCCTCAGT
GAGCGAGCGAGCGCGCAGAGAGGGAGTGGCCAACTCCATCACTAGGGGTTCCTCGTCTGTCTAATTCCAGCCAAG
GGCATGGGGGAAAGGACAGAGCCCAGGGACCTGTGGCCTATTCTCTGAGAGGACGCTGGGCTAATAATAGGAGGG
GAGATTAGGGAGGGATTTGACTGCATTGTTATCTCACAGGAATGGCGTTTGAGAGCCTTGCTTCCAAGCTCTTCC
AAGAGTCATGCCACCCCCCTCCAATCTCTGTGGAAGTGCCCACTGCCTTTCCCGCTTCGTTCTCTTCTCTCGGTC
CCATCCCTGACCCACTAGCCTGGTGCCGGGGGGAGACCAATTTCTGGAGGAAGCTCTGGGTACCCAGTCTTGCCC
TAAGCCTGCCTCTGAACAGGCTGTTCTTGTTTATGACCCCCGTCCCAGCAGAATAGTGATTGCTCATCCCTGCAT
GTGATTTGAGAGGGCCAGTCTTTCAGGCCTGGAGGAAACTCAAGCCCCACCAGCCGCTTGGCATCGGAATGCTCA
GCTGGTCCCCTCCTGGGGCTCATGTGACCAAGATCTAGCTATAAATATCAGAGGGGCCTCAGACCAAGACAGAAT
TCGGGCACCAGGAGAAGGAAGCCAACAGGATCCGACCCGGTGTTTTGTGACAAAGGCAAGACCCCCAGGTCTACT
TAGAGCAACGTTAGTAGAGGACAGCCCAGGTACCTGGGCAGGTAAGTATCAAGGTTACAAGACAGGTTTAAGGAG
ACCAATAGAAACTGGGCTTGTCGAGACAGAGAAGACTCTTGCGTTTCTGATAGGCACCTATTGGTCTTACTGACA
TCCACTTTGCCTTTCTCTCCACAGGTGTCCAGACTAGTGCCACCATGCTGTGGTGGGAGGAGGTGGAGGATTGCT
ACGAGAGAGAGGACGTGCAGAAGAAAACCTTCACCAAATGGGTGAACGCCCAGTTCAGCAAGTTTGGCAAGCAGC
ACATCGAGAACCTGTTCAGCGATCTGCAGGACGGCCGCAGGCTGCTGGATCTGCTGGAGGGTCTGACCGGCCAGA
AACTGCCCAAAGAGAAGGGATCAACCAGGGTGCACGCCCTGAATAATGTGAACAAGGCCCTGAGAGTGCTGCAAA
ATAATAATGTGGATCTGGTGAACATCGGATCTACCGATATTGTGGACGGCAACCATAAGCTGACTCTGGGCCTGA
TCTGGAATATCATCCTGCACTGGCAGGTGAAAAATGTGATGAAAAACATCATGGCCGGGCTGCAGCAGACCAACT
CTGAGAAGATCCTGCTGAGCTGGGTGAGGCAGTCTACAAGAAATTACCCCCAGGTGAACGTGATCAATTTCACCA
CCAGCTGGTCCGACGGGCTGGCTCTGAATGCCCTGATTCACAGCCACCGGCCCGACCTGTTCGACTGGAATTCCG
TGGTGTGCCAGCAGAGCGCCACACAGAGACTGGAGCACGCTTTCAATATCGCTCGGTATCAGCTGGGCATCGAGA
AGCTGCTGGACCCCGAGGACGTGGACACTACTTACCCCGATAAAAAGAGCATCCTGATGTATATCACCTCCCTGT
TCCAAGTGCTGCCCCAGCAGGTCTCCATCGAGGCCATCCAGGAGGTGGAAATGCTGCCCCGGCCCCCAAAGGTGA
CAAAGGAAGAACACTTCCAGCTCCACCACCAGATGCACTACTCTCAGCAGATCACCGTGAGCCTGGCCCAGGGGT
ACGAGCGGACCTCTTCTCCAAAGCCCCGCTTCAAGAGCTATGCCTATACCCAGGCCGCCTATGTGACCACCTCCG
ATCCCACCCGCTCACCCTTCCCTTCTCAACACCTGGAAGCCCCAGAGGACAAGTCCTTCGGCAGTTCTCTGATGG
AGTCTGAGGTGAACCTGGATAGATATCAGACTGCCCTGGAGGAGGTGCTGTCTTGGCTGCTCTCCGCCGAGGACA
CCCTGCAGGCACAGGGCGAGATCTCCAACGATGTGGAGGTGGTGAAGGACCAGTTCCACACACACGAGGGCTATA
TGATGGACCTGACTGCCCATCAGGGCAGAGTGGGCAATATCCTGCAGCTGGGTTCCAAACTGATAGGCACCGGAA
AGCTGAGCGAAGACGAGGAGACCGAGGTGCAGGAGCAGATGAATCTGCTGAACTCCCGGTGGGAGTGCCTGCGAG
TCGCCAGCATGGAAAAGCAGAGCAACCTGCACCGCGTGCTCATGGATCTGCAGAATCAGAAGCTGAAGGAGCTGA
ATGACTGGCTGACCAAGACCGAAGAGCGCACCAGGAAGATGGAGGAGGAGCCACTGGGCCCCGATCTGGAGGACC
TGAAAAGACAGGTGCAGCAGCATAAAGTGCTGCAGGAGGACCTGGAGCAGGAACAAGTGAGAGTGAATTCTCTGA
CACACATGGTGGTGGTGGTGGACGAGAGCAGCGGCGACCACGCAACAGCCGCCCTGGAGGAGCAGCTGAAAGTGC
TGGGAGACCGGTGGGCCAACATTTGCCGGTGGACCGAGGACCGCTGGGTGCTGCTGCAGGACATTCTGCTGAAGT
GGCAGCGGCTGACCGAAGAGCAGTGCCTGTTCTCCGCCTGGCTGAGCGAGAAGGAGGACGCCGTGAATAAGATCC
ACACCACCGGGTTCAAGGACCAGAATGAGATGCTGTCCAGCCTGCAGAAGCTGGCCGTGCTGAAGGCCGATCTGG
AAAAGAAGAAGCAGAGCATGGGAAAGCTGTATAGCCTGAAGCAGGACCTGCTGTCTACTCTGAAAAACAAGTCAG
TGACCCAGAAGACCGAGGCCTGGCTGGACAACTTCGCCCGCTGCTGGGACAACCTGGTGCAGAAGCTGGAAAAGA
GCACCGCCCAGATCAGCCAGGCAGTGACTACCACACAGCCCTCCCTGACACAGACTACTGTGATGGAGACCGTGA
CAACAGTGACCACAAGGGAGCAGATCCTGGTGAAGCACGCCCAGGAAGAACTGCCCCCTCCACCCCCTCAGAAGA
AGAGAACTCTGGAAAGACTGCAGGAGCTGCAGGAGGCCACTGACGAGCTGGACCTGAAGCTGCGGCAGGCCGAGG
TGATTAAGGGCAGCTGGCAGCCTGTGGGCGATCTGCTGATCGACAGCCTGCAGGACCACCTGGAGAAGGTGAAAG
CCCTGCGGGGCGAGATCGCCCCTCTGAAGGAGAACGTCAGCCATGTGAATGACCTGGCCAGACAGCTGACCACAC
TGGGGATTCAGCTGTCTCCTTACAATCTGTCAACCCTGGAGGACCTGAACACTCGCTGGAAGCTGCTGCAGGTGG
CCGTGGAGGACAGGGTGCGGCAGCTGCACGAAGCCCATCGCGACTTTGGGCCCGCCTCTCAGCACTTTCTGAGCA
CCTCCGTGCAGGGACCCTGGGAGCGGGCAATCAGCCCAAACAAGGTGCCATACTACATCAACCACGAGACCCAGA
CCACCTGTTGGGATCACCCCAAGATGACAGAGCTGTACCAGTCTCTGGCTGACCTGAACAACGTGCGGTTCTCAG
CCTACAGGACCGCCATGAAGCTGCGGAGACTGCAGAAGGCCCTGTGCCTGGATCTGCTGAGCCTCTCCGCTGCTT
GTGACGCCCTGGATCAGCACAACCTGAAACAGAACGACCAGCCAATGGACATCCTGCAGATTATTAATTGCCTGA
CAACCATCTATGATCGGCTGGAACAGGAGCACAATAATCTGGTGAACGTGCCACTGTGCGTGGACATGTGCCTGA
ATTGGCTGCTGAACGTGTACGACACAGGACGGACCGGCAGAATCAGAGTGCTGTCTTTTAAGACCGGGATCATCA
GCCTGTGCAAAGCCCACCTGGAGGACAAGTACCGGTATCTGTTCAAACAAGTGGCCTCCAGCACCGGCTTTTGCG
ACCAGCGCAGGCTGGGCCTGCTGCTCCACGACTCCATCCAGATCCCTAGACAGCTGGGCGAGGTGGCTTCTTTTG
GCGGATCCAATATCGAGCCCAGTGTGCGGAGCTGTTTTCAGTTTGCTAATAATAAGCCTGAGATCGAGGCCGCTC
TGTTCCTGGACTGGATGAGACTGGAGCCCCAGTCCATGGTGTGGCTGCCAGTGCTGCACAGGGTCGCCGCCGCAG
AGACTGCCAAGCACCAGGCCAAGTGCAACATCTGCAAAGAATGCCCAATCATTGGCTTTAGATACCGGAGCCTCA
AACACTTTAACTACGACATCTGCCAGAGCTGCTTCTTCTCCGGCCGGGTGGCCAAGGGCCACAAGATGCACTACC
CCATGGTGGAGTACTGTACCCCAACCACTTCCGGCGAGGACGTGAGAGATTTCGCCAAGGTGCTGAAGAACAAGT
TCCGGACAAAGAGATACTTTGCAAAACACCCAAGAATGGGCTACCTGCCAGTGCAGACCGTGCTGGAGGGGGACA
ATATGGAGACAGACACAATGTGATAGATTCTCATACAGCTAGATAACCAAAGAAGATCAGTCATACAGCTAGATA
ACCAAAGAAGACGCAGGAATAAAATATCTTTATTTTCATTACATCTGTGTGTTGGTTTTTTGTGTGAGGAACCCC
TAGTGATGGAGTTGGCCACTCCCTCTCTGCGCGCTCGCTCGCTCACTGAGGCCGGGCGACCAAAGGTCGCCCGAC
GCCCGGGCTTTGCCCGGGCGGCCTCAGTGAGCGAGCGAGCGCGC

| Nucleic acid | |
|---|---|
| cargo 27 | |
| annotated | Sequence |
| AAV2 ITR | GCGCGCTCGCTCGCTCACTGAGGCCGCCCGGGCAAAGCCCGGGCGTCGGGCGACCT |
| | TTGGTCGCCCGGCCTCAGTGAGCGAGCGAGCGCGCAGAGAGGGAGTGGCCAACTCC |
| | ATCACTAGGGGTTCCT (SEQ ID NO: 2408) |
| Novel promoter | CGTCTGTCTAATTCCAGCCAAGGGCATGGGGGAAAGGACAGAGCCCAGGGACCTGT |
| | GGCCTATTCTCTGAGAGGACGCTGGGCTAATAATAGGAGGGGAGATTAGGGAGGGA |
| | TTTGACTGCATTGTTATCTCACAGGAATGGCGTTTGAGAGCCTTGCTTCCAAGCTC |
| | TTCCAAGAGTCATGCCACCCCCCTCCAATCTCTGTGGAAGTGCCCACTGCCTTTCC |
| | CGCTTCGTTCTCTTCTCTCGGTCCCATCCCTGACCCACTAGCCTGGTGCCGGGGGG |
| | AGACCAATTTCTGGAGGAAGCTCTGGGTACCCAGTCTTGCCCTAAGCCTGCCTCTG |
| | AACAGGCTGTTCTTGTTTATGACCCCCGTCCCAGCAGAATAGTGATTGCTCATCCC |
| | TGCATGTGATTTGAGAGGGCCAGTCTTTCAGGCCTGGAGGAAACTCAAGCCCCACC |
| | AGCCGCTTGGCATCGGAATGCTCAGCTGGTCCCCTCCTGGGGCTCATGTGACCAAG |
| | ATCTAGCTATAAATATCAGAGGGGCCTCAGACCAAGACAGAATTCGGGCACCAGGA |
| | GAAGGAAGCCAACAGGATCCGACCCGGTGTTTTGTGACAAAGGCAAGACCCCCAGG |
| | TCTACTTAGAGCAACGTTAGTAGAGGA (SEQ ID NO: 2404) |
| Intron | GTAAGTATCAAGGTTACAAGACAGGTTTAAGGAGACCAATAGAAACTGGGCTTGTC |
| | GAGACAGAGAAGACTCTTGCGTTTCTGATAGGCACCTATTGGTCTTACTGACATCC |
| | ACTTTGCCTTTCTCTCCACAG (SEQ ID NO: 2409) |
| Codon optimized | ATGCTGTGGTGGGAGGAGGTGGAGGATTGCTACGAGAGAGAGGACGTGCAGAAGAA |
| microdystrophin | AACCTTCACCAAATGGGTGAACGCCCAGTTCAGCAAGTTTGGCAAGCAGCACATCG |
| coding sequence | AGAACCTGTTCAGCGATCTGCAGGACGGCCGCAGGCTGCTGGATCTGCTGGAGGGT |
| | CTGACCGGCCAGAAACTGCCCAAAGAGAAGGGATCAACCAGGGTGCACGCCCTGAA |
| | TAATGTGAACAAGGCCCTGAGAGTGCTGCAAAATAATAATGTGGATCTGGTGAACA |
| | TCGGATCTACCGATATTGTGGACGGCAACCATAAGCTGACTCTGGGCCTGATCTGG |
| | AATATCATCCTGCACTGGCAGGTGAAAAATGTGATGAAAAACATCATGGCCGGGCT |
| | GCAGCAGACCAACTCTGAGAAGATCCTGCTGAGCTGGGTGAGGCAGTCTACAAGAA |
| | ATTACCCCCAGGTGAACGTGATCAATTTCACCACCAGCTGGTCCGACGGGCTGGCT |
| | CTGAATGCCCTGATTCACAGCCACCGGCCCGACCTGTTCGACTGGAATTCCGTGGT |
| | GTGCCAGCAGAGCGCCACACAGAGACTGGAGCACGCTTTCAATATCGCTCGGTATC |
| | AGCTGGGCATCGAGAAGCTGCTGGACCCCGAGGACGTGGACACTACTTACCCCGAT |
| | AAAAAGAGCATCCTGATGTATATCACCTCCCTGTTCCAAGTGCTGCCCCAGCAGGT |
| | CTCCATCGAGGCCATCCAGGAGGTGGAAATGCTGCCCCGGCCCCCAAAGGTGACAA |
| | AGGAAGAACACTTCCAGCTCCACCACCAGATGCACTACTCTCAGCAGATCACCGTG |
| | AGCCTGGCCCAGGGGTACGAGCGGACCTCTTCTCCAAAGCCCCGCTTCAAGAGCTA |
| | TGCCTATACCCAGGCCGCCTATGTGACCACCTCCGATCCCACCCGCTCACCCTTCC |
| | CTTCTCAACACCTGGAAGCCCCAGAGGACAAGTCCTTCGGCAGTTCTCTGATGGAG |
| | TCTGAGGTGAACCTGGATAGATATCAGACTGCCCTGGAGGAGGTGCTGTCTTGGCT |
| | GCTCTCCGCCGAGGACACCCTGCAGGCACAGGGCGAGATCTCCAACGATGTGGAGG |
| | TGGTGAAGGACCAGTTCCACACACACGAGGGCTATATGATGGACCTGACTGCCCAT |
| | CAGGGCAGAGTGGGCAATATCCTGCAGCTGGGTTCCAAACTGATAGGCACCGGAAA |
| | GCTGAGCGAAGACGAGGAGACCGAGGTGCAGGAGCAGATGAATCTGCTGAACTCCC |
| | GGTGGGAGTGCCTGCGAGTCGCCAGCATGGAAAAGCAGAGCAACCTGCACCGCGTG |
| | CTCATGGATCTGCAGAATCAGAAGCTGAAGGAGCTGAATGACTGGCTGACCAAGAC |
| | CGAAGAGCGCACCAGGAAGATGGAGGAGGAGCCACTGGGCCCCGATCTGGAGGACC |
| | TGAAAAGACAGGTGCAGCAGCATAAAGTGCTGCAGGAGGACCTGGAGCAGGAACAA |
| | GTGAGAGTGAATTCTCTGACACACATGGTGGTGGTGGTGGACGAGAGCAGCGGCGA |
| | CCACGCAACAGCCGCCCTGGAGGAGCAGCTGAAAGTGCTGGGAGACCGGTGGGCCA |
| | ACATTTGCCGGTGGACCGAGGACCGCTGGGTGCTGCTGCAGGACATTCTGCTGAAG |
| | TGGCAGCGGCTGACCGAAGAGCAGTGCCTGTTCTCCGCCTGGCTGAGCGAGAAGGA |
| | GGACGCCGTGAATAAGATCCACACCACCGGGTTCAAGGACCAGAATGAGATGCTGT |
| | CCAGCCTGCAGAAGCTGGCCGTGCTGAAGGCCGATCTGGAAAAGAAGAAGCAGAGC |
| | ATGGGAAAGCTGTATAGCCTGAAGCAGGACCTGCTGTCTACTCTGAAAAACAAGTC |
| | AGTGACCCAGAAGACCGAGGCCTGGCTGGACAACTTCGCCCGCTGCTGGGACAACC |
| | TGGTGCAGAAGCTGGAAAAGAGCACCGCCCAGATCAGCCAGGCAGTGACTACCACA |
| | CAGCCCTCCCTGACACAGACTACTGTGATGGAGACCGTGACAACAGTGACCACAAG |
| | GGAGCAGATCCTGGTGAAGCACGCCCAGGAAGAACTGCCCCCTCCACCCCCTCAGA |
| | AGAAGAGAACTCTGGAAAGACTGCAGGAGCTGCAGGAGGCCACTGACGAGCTGGAC |
| | CTGAAGCTGCGGCAGGCCGAGGTGATTAAGGGCAGCTGGCAGCCTGTGGGCGATCT |
| | GCTGATCGACAGCCTGCAGGACCACCTGGAGAAGGTGAAAGCCCTGCGGGGCGAGA |
| | TCGCCCCTCTGAAGGAGAACGTCAGCCATGTGAATGACCTGGCCAGACAGCTGACC |
| | ACACTGGGGATTCAGCTGTCTCCTTACAATCTGTCAACCCTGGAGGACCTGAACAC |
| | TCGCTGGAAGCTGCTGCAGGTGGCCGTGGAGGACAGGGTGCGGCAGCTGCACGAAG |
| | CCCATCGCGACTTTGGGCCCGCCTCTCAGCACTTTCTGAGCACCTCCGTGCAGGGA |
| | CCCTGGGAGCGGGCAATCAGCCCAAACAAGGTGCCATACTACATCAACCACGAGAC |
| | CCAGACCACCTGTTGGGATCACCCCAAGATGACAGAGCTGTACCAGTCTCTGGCTG |
| | ACCTGAACAACGTGCGGTTCTCAGCCTACAGGACCGCCATGAAGCTGCGGAGACTG |
| | CAGAAGGCCCTGTGCCTGGATCTGCTGAGCCTCTCCGCTGCTTGTGACGCCCTGGA |
| | TCAGCACAACCTGAAACAGAACGACCAGCCAATGGACATCCTGCAGATTATTAATT |
| | GCCTGACAACCATCTATGATCGGCTGGAACAGGAGCACAATAATCTGGTGAACGTG |
| | CCACTGTGCGTGGACATGTGCCTGAATTGGCTGCTGAACGTGTACGACACAGGACG |
| | GACCGGCAGAATCAGAGTGCTGTCTTTTAAGACCGGGATCATCAGCCTGTGCAAAG |
| | CCCACCTGGAGGACAAGTACCGGTATCTGTTCAAACAAGTGGCCTCCAGCACCGGC |
| | TTTTGCGACCAGCGCAGGCTGGGCCTGCTGCTCCACGACTCCATCCAGATCCCTAG |
| | ACAGCTGGGCGAGGTGGCTTCTTTTGGCGGATCCAATATCGAGCCCAGTGTGCGGA |
| | GCTGTTTTCAGTTTGCTAATAATAAGCCTGAGATCGAGGCCGCTCTGTTCCTGGAC |
| | TGGATGAGACTGGAGCCCCAGTCCATGGTGTGGCTGCCAGTGCTGCACAGGGTCGC |
| | CGCCGCAGAGACTGCCAAGCACCAGGCCAAGTGCAACATCTGCAAAGAATGCCCAA |
| | TCATTGGCTTTAGATACCGGAGCCTCAAACACTTTAACTACGACATCTGCCAGAGC |
| | TGCTTCTTCTCCGGCCGGGTGGCCAAGGGCCACAAGATGCACTACCCCATGGTGGA |
| | GTACTGTACCCCAACCACTTCCGGCGAGGACGTGAGAGATTTCGCCAAGGTGCTGA |
| | AGAACAAGTTCCGGACAAAGAGATACTTTGCAAAACACCCAAGAATGGGCTACCTG |
| | CCAGTGCAGACCGTGCTGGAGGGGGACAATATGGAGACAGACACAATGTGA |
| | (SEQ ID NO: 2407) |
| First DRG de- | TCATACAGCTAGATAACCAAAGA (SEQ ID NO: 2401) |
| targeting miRNA | |
| binding site | |
| Second DRG de- | TCATACAGCTAGATAACCAAAGA (SEQ ID NO: 2401) |
| targeting miRNA | |
| binding site | |
| Short polyA | AGGAATAAAATATCTTTATTTTCATTACATCTGTGTGTTGGTTTTTTGTGTG |
| | (SEQ ID NO: 2410) |
| AAV2 ITR | AGGAACCCCTAGTGATGGAGTTGGCCACTCCCTCTCTGCGCGCTCGCTCGCTCACT |
| | GAGGCCGGGCGACCAAAGGTCGCCCGACGCCCGGGCTTTGCCCGGGCGGCCTCAGT |
| | GAGCGAGCGAGCGCGC (SEQ ID NO: 2411) |

### Example 2: Materials and Methods

[0572] The following Materials and Methods were used in experiments described herein.

[0573] Mice: The following mice were purchased from the Jackson laboratories: B10-mdx (JAX, #001801) and DBA/2J-mdx (JAX, 013141). Mice were injected retro-orbitally with Composition 1 at the indicated dose.

[0574] Cynomolgus Macaques: Juvenile male non-human primates were injected intravenously with Composition 1 at the indicated dose.

[0575] Microdystrophin Expression: Microdystrophin mRNA was quantified using a standard taqman assay. nhpRPL30 mRNA was used as the housekeeping control for quantification of microdystrophin expression. Microdystrophin protein was quantified using an automated capillary-based immunoassay (JESS™ automated western blotting). Protein was extracted from tissues and cultured cells. The mDys-FLAG protein expression was evaluated using an anti-dystrophin antibody at 1:10 dilution (Cat #MANHINGE2A, Developmental Studies Hybridoma Bank, University of Iowa). The amount of the mDys-FLAG expressed in tissues was calculated by interpolation to the full-length dystrophin standard curve derived from a pool of normal human heart or skeletal muscle samples that were diluted in dystrophin-deficient mdx mouse skeletal muscle to achieve levels of 100, 75, 50, 25, 0% of normal dystrophin. The relative intensity of the full-length and mDys-FLAG protein was normalized to alpha actinin-2 (ACTN2) using an anti-ACTN2 antibody at 1:800 dilution, which was used as a loading control (Abcam Cat #ab68167).

[0576] Vector Genome Quantification: For the vector genome quantification experiments, total DNA was extracted from tissue samples and DNA concentration was determined by Qubit dsDNA high-sensitivity assay kit (Thermo Fisher Scientific) using the QUBIT™ 4.0 Fluorometer (ThemoFisher Scientific). DNA was diluted to 0.5 ng/μL.

[0577] The VCN was quantified by digital droplet polymerase chain reaction (ddPCR) using ddPCR Supermix for Probes (no dUTP) (Bio-Rad Laboratories, Inc.) and an assay targeting a region in the viral genome. The VCN was normalized by the number of diploid genomes using the endogenous NHP telomerase gene (nhpTERT). All primers and probes were synthesized by Thermo Fisher Scientific. The ddPCR was performed using the QX200 ddPCR system (Bio-Rad Laboratories, Inc).

[0578] Immunofluorescence: Cryosections (10 mm in thickness) were sectioned from isopentane-frozen tissue and used for immunofluorescence staining to assess the level of the mDys-FLAG in a subset set of skeletal and heart tissues. The mDys-FLAG protein expression was examined with a rabbit monoclonal antibody against the FLAG peptide (Cat #14793S, 1:100, Cell Signaling Technology) and was visualized using Alexa Fluor 546 conjugated goat anti-rabbit IgG (H+L) antibody (Catalog #A-11035, 1:100, Thermo Fisher Scientific). The percentage of mDys-positive cells was quantified from digitalized FLAG immunostaining images using Biodock, an AI imaging software platform.

[0579] Mouse Muscle Physiology Analysis: The mechanical properties of the EDL muscle were assessed using an ex-vivo assay to evaluate the isometric, eccentric, and passive properties. The assay was performed using an isolated muscle force system (Aurora Scientific) according to published protocols, except that the EDL muscle was strained at 15% of the optimal muscle length during the eccentric contraction cycle (Hakim, Li, and Duan 2011; Hakim, Grange, and Duan 2011; Hakim, Wasala, and Duan 2013).

[0580] Statistical Analysis: Data are presented as means±standard deviation (SD). Statistical significance from the mdx-vehicle group was determined with one-way ANOVA analysis for the grip strength, ex-vivo assay (anatomical properties, isometric force, and viscous properties of the EDL muscle), and morphological analysis, or Two-way ANOVA analysis for the eccentric contraction profile and elastic properties. All statistical analyses were performed using GraphPad PRISM software version 10.2.3. P<0.05 was considered statistically significant.

### Example 3: Administration of Composition 1 to B10-Mdx Mice Resulted in Widespread Microdystrophin Expression

[0581] A composition comprising a vector and transgene of the invention, referred to as Composition 1 was engineered, comprising the AAV capsid MyoAAV-LD B and a cargo comprising the novel promoter, codon optimized microdystrophin, a FLAG peptide tag, and two DRG de-targeting miRNA binding sites (two binding sites for miR-338-3p). The cargo nucleic acid sequence for Composition 1 is provided as SEQ ID NO: 2430 (SEQ ID NO: 2430 does not include the FLAG tag sequence). The FLAG tag in Composition 1 is fused to the C-terminal of microdystrophin and is used to detect FLAG tagged microdystrophin. Composition 1 includes the cargo nucleic acid sequence (SEQ ID NO: 2430) and the AAV capsid protein MyoAAV-LD B, which is described above in Example 1.

[0582] The Reference AAV composition comprised an AAVrh74 capsid, an MHCK7 promoter, microdystrophin, and a FLAG peptide tag. The Reference AAV composition is a surrogate of SRP-9001, which is a microdystrophin gene replacement therapy approved by the Food and Drug Administration (FDA). Compositions were administered into 8 weeks old B10-mdx mice, which is a mouse model of DMD. B10-mdx mice were injected with vehicle (n=8) as a negative control. Mice were necropsied 6 weeks post-injection. Microdystrophin expression was detected and quantified using whole-tissue fluorescent imaging and a capillary-based immunoassay.

[0583] Administration is detailed in the table below:

| Test Article | No. of Animals | Dose | |
|---|---|---|---|
| Composition 1 | 8 | 4E+13 | vg/kg |
| Reference AAV composition | 8 | 1.33E+14 | vg/kg |

[0584] FIG. 1A shows images of FLAG immunofluorescence of microdystrophin expression in B10-mdx mouse quadriceps following administration of Composition 1 or the Reference AAV composition (AAVrh74-MHCK7-uDys-FLAG). FIG. 1B shows results from capillary electrophoresis quantifying microdystrophin expression in mouse quadriceps following administration of Composition 1 or the Reference AAV composition.

[0585] Administration of Composition 1 resulted in 8 times higher microdystrophin protein expression in quadriceps of dystrophic mice compared to the Reference AAV composition (FIGS. 1A-1B).

[0586] FIG. 2A shows images of FLAG immunofluorescence of microdystrophin expression in B10-mdx mouse triceps following administration of Composition 1 or the Reference AAV composition. FIG. 2B shows results from capillary electrophoresis quantifying microdystrophin expression in B10-mdx mouse triceps following administration of Composition 1 or the Reference AAV composition.

[0587] Administration of Composition 1 resulted in 8 times higher microdystrophin protein expression in triceps of dystrophic mice compared to the Reference AAV composition (FIGS. 2A-2B).

[0588] FIG. 3A shows images of FLAG immunofluorescence of microdystrophin expression in B10-mdx mouse heart following administration of Composition 1 or the Reference AAV composition. FIG. 3B shows results from capillary electrophoresis quantifying microdystrophin expression in B10-mdx mouse hearts following administration of Composition 1 or the Reference AAV composition.

[0589] Administration of Composition 1 resulted in 3 times higher microdystrophin protein expression in heart muscle of dystrophic mice compared to the Reference AAV composition (FIGS. 3A-3B).

[0590] Taken together, these results demonstrate that Composition 1-injected mice had greater expression of microdystrophin in each muscle group tested compared to Reference AAV composition-injected mice. This observed increase in microdystrophin expression could be achieved using a lower dose of Composition 1 (4E+13 vg/kg) than Reference AAV composition (1.33E+14 vg/kg).

### Example 4: Administration of Composition 1 to B10-Mdx Mice Resulted in Restoration of Muscle Function

[0591] Muscle physiology of mice injected with Composition 1 or Reference AAV composition was analyzed. Specific force (FIG. 4A), protection of muscle against eccentric contraction (FIG. 4B), and microdystrophin expression (FIG. 4C) of extensor digitorum longus (EDL) muscle was analyzed. Protection of dystrophic skeletal muscle against eccentric damage was shown to be dependent on microdystrophin expression levels (FIGS. 4A-4C). EDL muscle was analyzed in mice 6 weeks after injection.

[0592] FIG. 4A shows a graph of specific force following administration of Composition 1 or the Reference AAV composition. FIG. 4B shows a graph of protection against eccentric damage following administration of Composition 1 or the Reference AAV composition. FIG. 4C shows results from capillary electrophoresis from EDL muscle following administration of Composition 1 or the Reference AAV composition. The level of microdystrophin expression was determined by interpolation using a dystrophin standard curve derived from normal human skeletal muscle samples.

[0593] Composition 1 outperformed the Reference AAV composition, reverting specific force back to wild type levels (FIG. 4A). Composition 1 administration resulted in protection of the EDL muscle of B10-mdx mice against eccentric contraction (FIG. 4B). Notably, the Reference AAV failed to outperform the vehicle control in protecting against eccentric damage (FIG. 4B). Microdystrophin expression in EDL muscles of mice administered Composition 1 was confirmed (FIG. 4C), while little to no microdystrophin expression was detected in mice administered Reference AAV composition (FIG. 4C).

[0594] Taken together, these results demonstrate that muscles from Composition 1-injected mice had higher levels of microdystrophin expression, recovered significantly greater specific force, and were more protected from damage compared to muscles from Reference AAV composition-injected animals. Notably, the observed increase in microdystrophin expression and restoration of muscle function could be achieved using a lower dose of Composition 1 (4E+13 vg/kg) than the dose of Reference AAV composition (1.33E+14 vg/kg).

### Example 5: Administration of Composition 1 to Non-Human Primates (NHPs) Resulted in Effective Microdystrophin Expression in Heart and Skeletal Muscle

[0595] Composition 1 was further benchmarked against Reference AAV composition in NHPs, specifically cynomolgus macaques. Tissues were collected 28 days post-injection, and microdystrophin expression was detected on the sarcolemma using immunofluorescence and quantified using a capillary-based immunoassay. The level of microdystrophin expression was determined by interpolation using a dystrophin standard curve derived from normal human heart or skeletal muscle samples.

[0596] Administration is detailed in the table below:

| Test Article | No. of Animals | Dose | |
|---|---|---|---|
| Composition 1 | 3 | 4E+13 | vg/kg |
| Reference AAV composition | 3 | 1.33E+14 | vg/kg |

### NHP Heart:

[0597] FIG. 5A shows images of FLAG immunofluorescence of microdystrophin expression in NHP heart left ventricles following administration of Composition 1 or the Reference AAV composition. FIG. 5B shows results from capillary electrophoresis quantifying microdystrophin expression in NHP heart left ventricles following administration of Composition 1 or the Reference AAV composition.

[0598] Administration of Composition 1 to NHPs resulted in ˜60% microdystrophin protein expression in NHP heart left ventricles as compared to normal human heart dystrophin expression (FIG. 5B). The microdystrophin protein expression levels after injection of Reference AAV composition were below the limit of detection in NHP heart left ventricles (FIGS. 5A-5B).

[0599] FIG. 6A shows images of FLAG immunofluorescence of microdystrophin expression in NHP heart right ventricles following administration of Composition 1 or the Reference AAV composition. FIG. 6B shows results from capillary electrophoresis quantifying microdystrophin expression in NHP heart right ventricles following administration of Composition 1 or the Reference AAV composition.

[0600] Administration of Composition 1 to NHPs resulted in ˜80% microdystrophin protein expression in NHP heart right ventricles as compared to normal dystrophin expression (FIG. 6B, see FIG. 5B for human heart dystrophin standard). The microdystrophin protein levels after injection of Reference AAV composition was below the limit of detection in NHP heart right ventricles (FIGS. 6A-6B).

[0601] FIG. 7A shows images of FLAG immunofluorescence of microdystrophin expression in NHP heart interventricular septum following administration of Composition 1 or the Reference AAV composition. FIG. 7B shows results from capillary electrophoresis quantifying microdystrophin expression in NHP heart interventricular septum following administration of Composition 1 or the Reference AAV composition.

[0602] Administration of Composition 1 to NHPs resulted in ˜70% microdystrophin protein expression in NHP heart interventricular septum as compared to normal dystrophin expression (FIG. 7B, see FIG. 5B for human heart dystrophin standard). The microdystrophin protein levels after injection of Reference AAV composition was below the limit of detection in NHP heart interventricular septum (FIGS. 7A-7B).

[0603] Taken together, these results demonstrate that Composition 1-injected NHPs had greater expression of microdystrophin in each heart muscle group tested as compared to Reference AAV composition-injected NHPs. This observed increase in microdystrophin expression could be achieved using a lower dose of Composition 1 (4E+13 vg/kg) than Reference AAV composition (1.33E+14 vg/kg).

### NHP Skeletal Muscle:

[0604] FIG. 8A shows images of FLAG immunofluorescence of microdystrophin expression in NHP gastrocnemius following administration of Composition 1 or the Reference AAV composition. FIG. 8B shows results from capillary electrophoresis quantifying microdystrophin expression in NHP gastrocnemius following administration of Composition 1 or the Reference AAV composition.

[0605] Administration of Composition 1 to NHPs resulted in ˜55% microdystrophin protein expression in NHP gastrocnemius as compared to normal dystrophin expression (FIG. 8B). The microdystrophin protein levels after injection of Reference AAV composition was below the limit of detection in NHP gastrocnemius muscle (FIGS. 8A-8B).

[0606] FIG. 9A shows images of FLAG immunofluorescence of microdystrophin expression in NHP pectoralis major following administration of Composition 1 or the Reference AAV composition. FIG. 9B shows results from capillary electrophoresis quantifying microdystrophin expression in NHP pectoralis major following administration of Composition 1 or the Reference AAV composition.

[0607] Administration of Composition 1 resulted in ˜100% microdystrophin protein expression as compared to normal dystrophin expression (FIG. 9B, see FIG. 8B for human skeletal muscle dystrophin standard). The microdystrophin protein levels after injection of Reference AAV composition were below the limit of detection in NHP pectoralis major muscle (FIGS. 9A-9B).

[0608] FIG. 10A shows images of FLAG immunofluorescence of microdystrophin expression in NHP diaphragm following administration of Composition 1 or the Reference AAV composition. FIG. 10B shows results from capillary electrophoresis quantifying microdystrophin expression in NHP diaphragm following administration of Composition 1 or the Reference AAV composition.

[0609] Administration of Composition 1 resulted ˜120% transgene protein expression as compared to normal dystrophin expression (FIG. 10B, see FIG. 8B for human skeletal muscle dystrophin standard). The Reference AAV composition results resulted in less than 5% transgene expression in NHP diaphragm (FIGS. 10A-10B).

[0610] Taken together, these results demonstrate that Composition 1-injected NHPs had greater expression of microdystrophin in each skeletal muscle group tested as compared to Reference AAV composition-injected NHPs. This observed increase in microdystrophin expression in skeletal muscle could be achieved using a lower dose of Composition 1 (4E+13 vg/kg) than Reference AAV composition (1.33E+14 vg/kg).

### Liver Transduction

[0611] The liver is a major site of transduction by naturally occurring AAV capsids and a target of toxicity associated with administration of AAV vectors. Therefore, the abundance of liver genomes in the Composition 1-injected NHPs and the Reference AAV composition-injected NHPs was analyzed. FIG. 11 shows a graph of vector genome detected in the liver of NHPs injected with Composition 1 or Reference AAV composition.

[0612] Composition 1-injected NHPs had a 27 times lower vector genome per diploid genome in the liver compared to the Reference AAV composition-injected NHPs (FIG. 11).

[0613] Taken together, these results demonstrate that treatment with Composition 1 can achieve high levels of microdystrophin expression in heart and skeletal muscles of NHPs with lower transduction of liver cells.

### Example 6: Systemic Administration of Composition 1 Results in Dose-Dependent Improvement of Muscle Function in a Severe DMD Mouse Model and Results in High and Uniform Microdystrophin Expression in the Heart and Skeletal Muscles of Non-Human Primates

[0614] Duchenne muscular dystrophy (DMD) is a fatal disease, and the most common muscular dystrophy, with 20,000 boys diagnosed worldwide each year. DMD is caused by loss of the dystrophin protein, an essential component of the dystrophin-glycoprotein complex that preserves myofiber membrane integrity during contraction. Adeno-associated virus (AAV) mediated microdystrophin (mDys) gene replacement therapy is a promising approach to treat DMD. Unfortunately, clinical stage AAV-mDys therapies produce low, nonuniform mDys expression in skeletal muscles, with no clinical data supporting mDys expression in the heart, leading to suboptimal clinical efficacy and limited potential to address cardiomyopathy, a major cause of mortality in DMD. Engineered capsids together with regulatory element technologies of were used to develop the lead candidates of the invention, a novel AAV-mDys therapy with the potential to be safer and more effective. The lead candidate expresses a codon-optimized mDys selectively in cardiac and skeletal muscles by using a skeletal muscle/heart-tropic and liver de-targeted capsid (MyoAAV-LD B) and novel regulatory elements. A FLAG tag was added at the C-terminus of the mDys protein to facilitate immunofluorescent detection. To evaluate safety, efficacy, and mDys expression, 8-week-old male D2-mdx mice were injected intravenously with the lead candidate at 1E13, 2E13, and 4E13 vg/kg, and were evaluated 7 weeks later. The lead candidate produced a significant dose-dependent improvement in muscle pathology and fibrosis, grip strength, and mechanical properties of the extensor digitorum longus muscle ex vivo. Maximal efficacy occurred at 4E13 vg/kg, associated with mDys expression in nearly all myofibers at protein levels between 62 and 83% of normal human dystrophin levels. Furthermore, the lead candidate was well tolerated and did not induce toxicity in any treated mice.

[0615] To translate these findings to large animals and to guide human dose selection, biodistribution and safety of the lead candidate was evaluated in juvenile male non-human primates (NHPs). Animals received a single intravenous dose of 4E13 vg/kg, and tissues were collected 28- and 90-days post-dose. The lead candidate was well tolerated, had no effects on chemistry, hematology, or histopathology up to 90 days, and produced robust, uniform mDys expression in almost all skeletal muscle fibers and cardiomyocytes. The average levels of mDys protein in heart and skeletal muscles relative to normal human dystrophin were 72% and 66%, respectively. Further, the expression of the mDys transgene was highly selective for skeletal muscle and heart, with no transgene expression detected in off-target tissues.

[0616] In summary, the results illustrate the need for high mDys expression in the majority of myofibers to produce maximal efficacy, and for the first time demonstrate quantitative expression of mDys protein in NHP muscle at levels that are associated with maximal efficacy in a DMD mouse model. These results provide compelling preclinical data to support further development of Composition 1 to treat DMD.

### Example 7: Administration of Composition 1 Results in Dose-Dependent Microdystrophin Expression in a Severe DMD Mouse Model

[0617] To evaluate safety, efficacy, and microdystrophin expression of Composition 1 (described in Example 3), 8-week-old male D2-mdx mice, which is a severe mouse model of DMD, were injected intravenously with Composition 1 at 1E13, 2E13, or 4E13 vg/kg. Mice were evaluated 7 weeks and 22 weeks post-injection. WT mice and D2-mdx mice were injected with vehicle as a control. Microdystrophin expression was detected by FLAG immunofluorescence and quantified using capillary-based immunoassay.

[0618] Treatment with Composition 1 did not induce cardiotoxicity or hepatotoxicity in D2-mdx mice (data not shown). This demonstrates that Composition 1 can be administered with little to no damage or dysfunction to the heart and the liver.

[0619] FIG. 12 shows images of FLAG immunofluorescence of microdystrophin expression in D2-mdx mouse diaphragm, quadriceps, heart, and extensor digitorum longus (EDL) tissue at 7 weeks post injection following administration of Composition 1.

[0620] Immunofluorescence analysis of mouse tissues showed that Composition 1 treatment resulted in dose-dependent expression of microdystrophin in each of the muscles examined (EDL, diaphragm, quadriceps, and heart) (FIG. 12).

[0621] FIGS. 13A-13B shows results from capillary electrophoresis quantifying microdystrophin expression in D2-mdx mouse heart tissue at 7 weeks (FIG. 13A) and 22 weeks (FIG. 13B) following administration of Composition 1.

[0622] The examined heart tissues showed supra-physiological microdystrophin protein levels, exceeding 300% of normal in the low-dose group, and up to 535% in the high-dose group at 7 weeks post injection (FIG. 13A). At 22 weeks post dosing, the microdystrophin protein level in the heart was ˜2.2-fold higher than the 7-week time point across each of the tested doses (FIGS. 13A-13B).

[0623] FIGS. 14A-14B shows results from capillary electrophoresis quantifying microdystrophin expression in D2-mdx mouse skeletal muscle tissue at 7 weeks (FIG. 14A) and 22 weeks (FIG. 14B) following administration of Composition 1.

[0624] In skeletal muscle, microdystrophin protein level was, on average, 70% of normal in the low-dose group and was, on average, 83% of normal in the mid and high-dose groups at 7 weeks post-dosing (FIG. 14A). By 22 weeks, the microdystrophin protein level in skeletal muscles increased minimally by 1.2-fold across all doses (FIGS. 14A-14B). At 22 weeks post-injection, the percent of microdystrophin-FLAG positive myofibers in EDL and quadriceps was similar, with 76%, 88%, and 93% expression in the low, mid, and high doses, respectively (FIG. 14B).

[0625] Taken together, these results demonstrate that treatment with Composition 1 restored microdystrophin protein levels in heart and skeletal muscles in a severe DMD mouse model, without inducing cardiotoxicity or hepatotoxicity.

### Example 8: Administration of Composition 1 Increased Body and Tibialis Anterior (TA) Muscle Weights in a Severe DMD Mouse Model

[0626] Composition 1 (described in Example 3) was intravenously injected into 8-week-old male D2-mdx mice, a severe DMD mouse model, at a dose of 1E13, 2E13, or 4E13 vg/kg. WT mice and D2-mdx mice were injected with vehicle as a control. Body weight of mice was measured pre-dose and monitored twice weekly throughout the 7 weeks and 22 weeks study cohorts (FIGS. 15A-15B). Body weight and TA muscle weight were measured at 7 weeks and 22 weeks post-injection (FIGS. 16A-16B).

[0627] FIGS. 15A-15B show graphs of body weight of D2-mdx mouse over 7 weeks (FIG. 15A) and 22 weeks (FIG. 15B) following administration of Composition 1. After about 16 weeks, body weights of mice administered the high dose of Composition 1 were comparable to wild type mice (FIGS. 15A-15B).

[0628] FIGS. 16A-16B show graphs of body weight and TA weight of D2-mdx mouse at 7 weeks (FIG. 16A) and at 22 weeks (FIG. 16B) following administration of Composition 1.

[0629] Mice injected with the mid or high dose of Composition 1 showed a significant increase in body weight at 22 weeks post-dosing (FIG. 16B, left panel). Composition 1-injected mice at each of the tested doses showed a significant increase in TA weight after 7 weeks (FIG. 16A, right panel) and 22 weeks. (FIG. 16B, right panel).

[0630] Taken together, these results demonstrate that treatment with Composition 1 increased body and TA muscle weights in a severe DMD mouse model. The observed increase in body and TA muscle weights could be achieved using low (1E13 vg/kg), middle (2E13 vg/kg), and high (4E13 vg/kg) doses of Composition 1.

### Example 9: Administration of Composition 1 Improved the Mechanical Properties of Extensor Digitorum Longus (EDL) Muscle in a Severe DMD Mouse Model

[0631] Composition 1 (described in Example 3) was intravenously injected into 8-week-old male D2-mdx mice, a severe DMD mouse model, at a dose of 1E13, 2E13, or 4E13 vg/kg. WT mice and D2-mdx mice were injected with vehicle as a control. The anatomical properties (FIG. 17A and FIG. 18A), muscle contractility (FIG. 17B and FIG. 18B), protection against eccentric contraction (FIG. 17C and FIG. 18C), elastic properties (FIG. 17D and FIG. 18D), and viscous properties (FIG. 17E and FIG. 18E) of EDL muscle was analyzed at 7 weeks and 22 weeks post-injection.

[0632] FIG. 17A and FIG. 18A show graphs of anatomical measurements of EDL muscle, including cross-section area (CSA) and optimal length (Lo), in D2-mdx mouse at 7 weeks (FIG. 17A) or 22 weeks (FIG. 18A) post-injection of Composition 1.

[0633] FIG. 17B and FIG. 18B show graphs of quantitative measurements of muscle contractility in EDL muscle, including specific twitch force (Pt) and tetanic force (Po), in D2-mdx mouse at 7 weeks (FIG. 17B) or 12 weeks (FIG. 18B) post-injection of Composition 1.

[0634] FIG. 17C and FIG. 18C show a graph of eccentric contraction of EDL muscle in D2-mdx mice at 7 weeks (FIG. 17C) or 12 weeks (FIG. 18C) post-injection of Composition 1.

[0635] FIG. 17D and FIG. 18D show a graph of the stress-strain relationship, evaluating elasticity, of EDL muscle in D2-mdx mice at 7 weeks (FIG. 17D) or 12 weeks (FIG. 18D) post-injection of Composition 1.

[0636] FIG. 17E and FIG. 18E shows a graph of the stress relaxation rate, evaluation the viscous properties of muscle, of EDL muscle in D2-mdx mice at 7 weeks (FIG. 17E) or 12 weeks (FIG. 18E) post-injection of Composition 1.

[0637] Taken together, these results demonstrate that treatment of D2-mdx mice with Composition 1 improved the contractile properties of the EDL muscle in a dose-dependent manner and provided long-term protection of muscle function up to 22 weeks post-dosing. The treatment with Composition 1 was fully efficacious at the mid-dose of 2E13 vg/kg. However, further improvements in many mechanical parameters (e.g., EDL weight, optimal length, specific twitch force) were noted in the high-dose group (4E13 vg/kg).

### Example 10: Administration of Composition 1 Resulted in High and Selective Microdystrophin Expression in Heart and Skeletal Muscles of Non-Human Primates (NHPs)

[0638] Biodistribution and safety of the Composition 1 was evaluated in juvenile male non-human primates (NHPs). Animals received a single intravenous dose of 4E13 vg/kg of Composition 1, and tissues were collected 28- and 90-days post-injection. Microdystrophin-FLAG mRNA levels were assessed in heart, skeletal muscles, and off-target tissues. Expression of microdystrophin was analyzed by FLAG immunostaining.

[0639] Composition 1 was safe and well tolerated, with no treatment-related effects in clinical chemistry, hematology, and histopathology, including liver and DRG up to 90 days post-injection (data not shown).

[0640] FIG. 19A-19C show graphs of results quantifying transgene mRNA levels in NHP heart, skeletal muscle, and off-target tissues 28 days post administration of Composition 1. The transcript copy was normalized to nhpRPL30 (n=3/group). These results demonstrate that treatment of NHPs with Composition 1 results in high and selective expression of microdystrophin in NHP heart and skeletal muscles, with little to no expression in off-target tissues.

[0641] FIG. 20 shows FLAG immunofluorescence images of microdystrophin expression in NHP heart and skeletal muscles 28 days post administration of Composition 1. FIGS. 21A-21B show graphs of results from capillary electrophoresis quantifying microdystrophin expression in NHP heart and skeletal muscles at 28 days and 90 days post administration of Composition 1. The amount of the microdystrophin expressed in tissues was calculated by interpolation to the full-length dystrophin standard curve derived from normal human heart or skeletal muscle samples.

[0642] Treatment with Composition 1 resulted in high microdystrophin protein expression in skeletal muscles and the cardiomyocytes. After 28 days, treatment with Composition 1 resulted in robust microdystrophin protein expression levels in heart and skeletal muscles that were, on average, 72% and 66% of normal full-length dystrophin, respectively (FIGS. 21A-21B). Microdystrophin expression levels increased after 90 days post-injection, with microdystrophin protein expression levels in heart and skeletal muscles that were, on average, 136% and 96% of normal full-length dystrophin, respectively (FIGS. 21A-21B).

[0643] Taken together, these results demonstrate that a single intravenous dose of Composition 1 was safe and well tolerated in NHPs up to 90 days post injection and resulted in high microdystrophin transcript and protein expression in skeletal muscles and the heart.

[0644] The Examples described herein use Composition 1 as an example composition for treating DMD using the recombinant nucleic acids, vectors, and viral particles described herein.

### Example 11: Codon Optimization Increased Expression of Microdystrophin

[0645] Three different codon optimized microdystrophin sequences (referred to as v1, v2, and v3) were generated and the expression of microdystrophin from the codon optimized sequences was tested in C2C12 derived myotubes and human primary myotubes. Microdystrophin expression was detected and quantified using a capillary-based immunoassay. The level of microdystrophin expressed from codon optimized microdystrophin sequences was compared to the level of microdystrophin expressed from an endogenous coding sequence of dystrophin. Vinculin was used as a loading control.

[0646] FIGS. 22A-22B show results from capillary electrophoresis analysis of microdystrophin expression from an endogenous coding sequence or a codon optimized microdystrophin sequence (v1, v2, or v3) in C2C12 derived myotubes.

[0647] FIGS. 23A-23B show results from capillary electrophoresis analysis of microdystrophin expression from an endogenous coding sequence or a codon optimized microdystrophin sequence (v1, v2, or v3) in human primary myotubes.

[0648] In both C2C12 derived myotubes (FIGS. 22A-22B) and human primary myotubes (FIGS. 23A-23B), the level of expression of microdystrophin from each of the codon optimized microdystrophin sequences (v1, v2, v3) was significantly greater than the level of microdystrophin expressed from the endogenous coding sequence.

[0649] These results demonstrate that microdystrophin expression can be significantly increased using a codon optimized microdystrophin sequence (v1, v2, or v3) compared to the endogenous microdystrophin sequence.

### Example 12: Administration of MyoAAV-LD a Resulted in Higher Microdystrophin Expression Compared to AAV9 in NHPs

[0650] To investigate the muscle transduction profile of MyoAAV-LD A after systemic delivery, NHPs were injected with either MyoAAV-LD A- or AAV9-CBh-uDys-FLAG, and microdystrophin transgene expression in different muscle tissues of the injected NHPs was examined. CBh-uDys-FLAG includes a C-terminal FLAG tagged microdystrophin (uDys) under the control of a hybrid CBA promoter (CBh). Gastrocnemius muscle from NHPs injected with vehicle (saline) was used as a negative control.

[0651] Microdystrophin expression was detected using immunofluorescence and quantified using a capillary-based immunoassay. Microdystrophin mRNA was quantified using a standard taqman assay. nhpRPL30 mRNA was used as the housekeeping control for quantification of microdystrophin expression. Microdystrophin expression was assessed in skeletal muscles including gastrocnemius (FIGS. 24A-24C), triceps (FIGS. 25A-25C), biceps brachii (FIGS. 26A-26C), and pectoralis major (FIGS. 27A-27C).

[0652] Fluorescence imaging of harvested tissues revealed far greater fluorescence intensity in muscles of NHP injected with MyoAAV-LD A—as compared to AAV9-injected NHP (FIG. 24A, FIG. 25A, FIG. 26A, and FIG. 27A). Strong microdystrophin transgene expression in muscle fibers of MyoAAV-LD A-injected NHP was further confirmed by capillary electrophoresis (FIG. 24B, FIG. 25B, FIG. 26B, and FIG. 27B). Quantification of microdystrophin mRNA in different skeletal muscles of NHP revealed 15 to 40 times higher microdystrophin transgene expression in muscles of MyoAAV-LD A-injected NHPs compared to AAV9-injected NHPs (FIG. 24C, FIG. 25C, FIG. 26C, and FIG. 27C).

[0653] Taken together, these results demonstrate that MyoAAV-LD A can transduce skeletal muscles with significantly higher efficiency that wild type AAV9.

### Example 13: Administration of DMD Tool Compound Restores Muscle Force and Protects the Muscle Against Eccentric Damage in B10-Mdx Mice

[0654] Muscle physiology, including specific force (FIG. 28A) and protection of muscle against eccentric contraction (FIG. 28B), was analyzed in mice injected with a DMD tool compound that includes MyoAAV-LD B-uDys under the control of a muscle specific promoter. 8 weeks old B10-mdx mice were injected with 2E+13 vg/kg of the DMD tool compound, and EDL muscle was analyzed 6 weeks after injection.

[0655] Administration of the DMD tool compound reverted specific force back to wild type levels (FIG. 28A) and resulted in protection of the EDL muscle against eccentric contraction (FIG. 28B). These results demonstrate that delivery of microdystrophin to muscle tissues via MyoAAV-LD B can restore muscle strength and protect muscle against damage in a mouse model of DMD.

### CONCLUSION

[0656] AAV compositions of the invention (combining an engineered liver de-targeted MyoAAV capsid comprising the amino acid sequence RGDR (SEQ ID NO: 2440), a novel promoter of the invention, and a codon optimized microdystrophin sequence of the invention) result in expression of microdystrophin in mice and NHPs at rates far superior to a Reference AAVrh74 capsid comprising a muscle specific promoter (MHCK7) and a transgene encoding microdystrophin, while also reducing the presence of AAV genomes in the liver. Notably, the Reference AAV capsid resulted in very low microdystrophin expression in NHP skeletal muscles and undetectable expression in the NHP heart, while compositions of the invention resulted in uniform microdystrophin expression throughout NHP heart and skeletal muscle tissues with levels comparable to endogenous dystrophin levels.

### INCORPORATION BY REFERENCE

[0657] References and citations to other documents, such as patents, patent applications, patent publications, journals, books, papers, web contents, have been made throughout this disclosure. All such documents are hereby incorporated herein by reference in their entirety for all purposes.

### EQUIVALENTS

[0658] Various modifications of the invention and many further embodiments thereof, in addition to those shown and described herein, will become apparent to those skilled in the art from the full contents of this document, including references to the scientific and patent literature cited herein. The subject matter herein contains important information, exemplification and guidance that can be adapted to the practice of this invention in its various embodiments and equivalents thereof.

1. A recombinant nucleic acid comprising:
a muscle specific promoter;
a sequence encoding microdystrophin; and
at least one dorsal root ganglia (DRG) de-targeting miRNA binding site.

2. The recombinant nucleic acid of claim 1, wherein the muscle specific promoter comprises a CK8 promoter, a desmin promoter, a Mb promoter, a MCK promoter, a MHCK7 promoter, a skeletal muscle alpha actin promoter, or a TTNI2 promoter.

3. The recombinant nucleic acid of claim 1, wherein the promoter comprises or consists of a nucleic acid sequence that is at least 85%, at least 86%, at least 87%, at least 88%, at least 89%, at least 90%, at least 91%, at least 92%, at least 93%, at least 94%, at least 95%, at least 96%, at least 97%, at least 98%, or at least 99% identical to the nucleic acid sequence of any one of SEQ ID NOs: 2402-2404.

4.-6. (canceled)

7. The recombinant nucleic acid of claim 1, wherein the sequence encoding microdystrophin encodes a microdystrophin protein comprising or consisting of an amino acid sequence that is at least 85%, at least 86%, at least 87%, at least 88%, at least 89%, at least 90%, at least 91%, at least 92%, at least 93%, at least 94%, at least 95%, at least 96%, at least 97%, at least 98%, or at least 99% identical to SEQ ID NO: 2439.

8. (canceled)

9. The recombinant nucleic acid of claim 1, wherein the sequence encoding microdystrophin comprises or consists of a nucleic acid sequence that is at least 85%, at least 86%, at least 87%, at least 88%, at least 89%, at least 90%, at least 91%, at least 92%, at least 93%, at least 94%, at least 95%, at least 96%, at least 97%, at least 98%, or at least 99% identical to the nucleic acid sequence of any one of SEQ ID NOs: 2405-2407.

10.-12. (canceled)

13. The recombinant nucleic acid of claim 1, wherein the at least one DRG de-targeting miRNA binding site comprises a binding site for miR-338, miR-138, or miR-9.

14. The recombinant nucleic acid of claim 1, wherein the at least one DRG de-targeting miRNA binding site comprises a binding site for miR-338-3p, miR-138-5p, or miR-9-5p.

15. The recombinant nucleic acid of claim 1, wherein the at least one DRG de-targeting miRNA binding site comprises or consists of a nucleic acid sequence that is at least 85%, at least 86%, at least 87%, at least 88%, at least 89%, at least 90%, at least 91%, at least 92%, at least 93%, at least 94%, at least 95%, at least 96%, at least 97%, at least 98%, or at least 99% identical to the nucleic acid sequence of any one of SEQ ID NOs: 2399-2401.

16.-20. (canceled)

21. The recombinant nucleic acid of claim 1, wherein the recombinant nucleic acid comprises, optionally from 5′ to 3′:
the promoter comprising or consisting of a nucleic acid sequence that is at least 85%, at least 86%, at least 87%, at least 88%, at least 89%, at least 90%, at least 91%, at least 92%, at least 93%, at least 94%, at least 95%, at least 96%, at least 97%, at least 98%, or at least 99% identical to the nucleic acid sequence of any one of SEQ ID NOs: 2402-2404;
the sequence encoding microdystrophin comprising or consisting of a nucleic acid sequence that is at least 85%, at least 86%, at least 87%, at least 88%, at least 89%, at least 90%, at least 91%, at least 92%, at least 93%, at least 94%, at least 95%, at least 96%, at least 97%, at least 98%, or at least 99% identical to the nucleic acid sequence of any one of SEQ ID NOs: 2405-2407; and
the at least one DRG de-targeting miRNA binding site comprising or consisting of a nucleic acid sequence that is at least 85%, at least 86%, at least 87%, at least 88%, at least 89%, at least 90%, at least 91%, at least 92%, at least 93%, at least 94%, at least 95%, at least 96%, at least 97%, at least 98%, or at least 99% identical to the nucleic acid sequence of any one of SEQ ID NOs: 2399-2401.

22. The recombinant nucleic acid of claim 1, wherein the recombinant nucleic acid is selected from:
(a) a recombinant nucleic acid comprising:
the promoter comprising or consisting of a nucleic acid sequence that is at least 85%, at least 86%, at least 87%, at least 88%, at least 89%, at least 90%, at least 91%, at least 92%, at least 93%, at least 94%, at least 95%, at least 96%, at least 97%, at least 98%, or at least 99% identical to the nucleic acid sequence of SEQ ID NO: 2402;
the sequence encoding microdystrophin comprising or consisting of a nucleic acid sequence that is at least 85%, at least 86%, at least 87%, at least 88%, at least 89%, at least 90%, at least 91%, at least 92%, at least 93%, at least 94%, at least 95%, at least 96%, at least 97%, at least 98%, or at least 99% identical to the nucleic acid sequence of SEQ ID NO: 2405; and
the at least one DRG de-targeting miRNA binding site comprising or consisting of a nucleic acid sequence that is at least 85%, at least 86%, at least 87%, at least 88%, at least 89%, at least 90%, at least 91%, at least 92%, at least 93%, at least 94%, at least 95%, at least 96%, at least 97%, at least 98%, or at least 99% identical to the nucleic acid sequence of SEQ ID NO: 2399;
(b) a recombinant nucleic acid comprising:
the promoter comprising or consisting of a nucleic acid sequence that is at least 85%, at least 86%, at least 87%, at least 88%, at least 89%, at least 90%, at least 91%, at least 92%, at least 93%, at least 94%, at least 95%, at least 96%, at least 97%, at least 98%, or at least 99% identical to the nucleic acid sequence of SEQ ID NO: 2403;
the sequence encoding microdystrophin comprising or consisting of a nucleic acid sequence that is at least 85%, at least 86%, at least 87%, at least 88%, at least 89%, at least 90%, at least 91%, at least 92%, at least 93%, at least 94%, at least 95%, at least 96%, at least 97%, at least 98%, or at least 99% identical to the nucleic acid sequence of SEQ ID NO: 2405; and
the at least one DRG de-targeting miRNA binding site comprising or consisting of a nucleic acid sequence that is at least 85%, at least 86%, at least 87%, at least 88%, at least 89%, at least 90%, at least 91%, at least 92%, at least 93%, at least 94%, at least 95%, at least 96%, at least 97%, at least 98%, or at least 99% identical to the nucleic acid sequence of SEQ ID NO: 2399;
(c) a recombinant nucleic acid comprising:
the promoter comprising or consisting of a nucleic acid sequence that is at least 85%, at least 86%, at least 87%, at least 88%, at least 89%, at least 90%, at least 91%, at least 92%, at least 93%, at least 94%, at least 95%, at least 96%, at least 97%, at least 98%, or at least 99% identical to the nucleic acid sequence of SEQ ID NO: 2404;
the sequence encoding microdystrophin comprising or consisting of a nucleic acid sequence that is at least 85%, at least 86%, at least 87%, at least 88%, at least 89%, at least 90%, at least 91%, at least 92%, at least 93%, at least 94%, at least 95%, at least 96%, at least 97%, at least 98%, or at least 99% identical to the nucleic acid sequence of SEQ ID NO: 2405; and
the at least one DRG de-targeting miRNA binding site comprising or consisting of a nucleic acid sequence that is at least 85%, at least 86%, at least 87%, at least 88%, at least 89%, at least 90%, at least 91%, at least 92%, at least 93%, at least 94%, at least 95%, at least 96%, at least 97%, at least 98%, or at least 99% identical to the nucleic acid sequence of SEQ ID NO: 2399;
(d) a recombinant nucleic acid comprising:
the promoter comprising or consisting of a nucleic acid sequence that is at least 85%, at least 86%, at least 87%, at least 88%, at least 89%, at least 90%, at least 91%, at least 92%, at least 93%, at least 94%, at least 95%, at least 96%, at least 97%, at least 98%, or at least 99% identical to the nucleic acid sequence of SEQ ID NO: 2402;
the sequence encoding microdystrophin comprising or consisting of a nucleic acid sequence that is at least 85%, at least 86%, at least 87%, at least 88%, at least 89%, at least 90%, at least 91%, at least 92%, at least 93%, at least 94%, at least 95%, at least 96%, at least 97%, at least 98%, or at least 99% identical to the nucleic acid sequence of SEQ ID NO: 2405; and
the at least one DRG de-targeting miRNA binding site comprising or consisting of a nucleic acid sequence that is at least 85%, at least 86%, at least 87%, at least 88%, at least 89%, at least 90%, at least 91%, at least 92%, at least 93%, at least 94%, at least 95%, at least 96%, at least 97%, at least 98%, or at least 99% identical to the nucleic acid sequence of SEQ ID NO: 2400;
(e) a recombinant nucleic acid comprising:
the promoter comprising or consisting of a nucleic acid sequence that is at least 85%, at least 86%, at least 87%, at least 88%, at least 89%, at least 90%, at least 91%, at least 92%, at least 93%, at least 94%, at least 95%, at least 96%, at least 97%, at least 98%, or at least 99% identical to the nucleic acid sequence of SEQ ID NO: 2403;
the sequence encoding microdystrophin comprising or consisting of a nucleic acid sequence that is at least 85%, at least 86%, at least 87%, at least 88%, at least 89%, at least 90%, at least 91%, at least 92%, at least 93%, at least 94%, at least 95%, at least 96%, at least 97%, at least 98%, or at least 99% identical to the nucleic acid sequence of SEQ ID NO: 2405; and
the at least one DRG de-targeting miRNA binding site comprising or consisting of a nucleic acid sequence that is at least 85%, at least 86%, at least 87%, at least 88%, at least 89%, at least 90%, at least 91%, at least 92%, at least 93%, at least 94%, at least 95%, at least 96%, at least 97%, at least 98%, or at least 99% identical to the nucleic acid sequence of SEQ ID NO: 2400;
(f) a recombinant nucleic acid comprising:
the promoter comprising or consisting of a nucleic acid sequence that is at least 85%, at least 86%, at least 87%, at least 88%, at least 89%, at least 90%, at least 91%, at least 92%, at least 93%, at least 94%, at least 95%, at least 96%, at least 97%, at least 98%, or at least 99% identical to the nucleic acid sequence of SEQ ID NO: 2404;
the sequence encoding microdystrophin comprising or consisting of a nucleic acid sequence that is at least 85%, at least 86%, at least 87%, at least 88%, at least 89%, at least 90%, at least 91%, at least 92%, at least 93%, at least 94%, at least 95%, at least 96%, at least 97%, at least 98%, or at least 99% identical to the nucleic acid sequence of SEQ ID NO: 2405; and
the at least one DRG de-targeting miRNA binding site comprising or consisting of a nucleic acid sequence that is at least 85%, at least 86%, at least 87%, at least 88%, at least 89%, at least 90%, at least 91%, at least 92%, at least 93%, at least 94%, at least 95%, at least 96%, at least 97%, at least 98%, or at least 99% identical to the nucleic acid sequence of SEQ ID NO: 2400;
(g) a recombinant nucleic acid comprising:
the promoter comprising or consisting of a nucleic acid sequence that is at least 85%, at least 86%, at least 87%, at least 88%, at least 89%, at least 90%, at least 91%, at least 92%, at least 93%, at least 94%, at least 95%, at least 96%, at least 97%, at least 98%, or at least 99% identical to the nucleic acid sequence of SEQ ID NO: 2402;
the sequence encoding microdystrophin comprising or consisting of a nucleic acid sequence that is at least 85%, at least 86%, at least 87%, at least 88%, at least 89%, at least 90%, at least 91%, at least 92%, at least 93%, at least 94%, at least 95%, at least 96%, at least 97%, at least 98%, or at least 99% identical to the nucleic acid sequence of SEQ ID NO: 2405; and
the at least one DRG de-targeting miRNA binding site comprising or consisting of a nucleic acid sequence that is at least 85%, at least 86%, at least 87%, at least 88%, at least 89%, at least 90%, at least 91%, at least 92%, at least 93%, at least 94%, at least 95%, at least 96%, at least 97%, at least 98%, or at least 99% identical to the nucleic acid sequence of SEQ ID NO: 2401;
(h) a recombinant nucleic acid comprising:
the promoter comprising or consisting of a nucleic acid sequence that is at least 85%, at least 86%, at least 87%, at least 88%, at least 89%, at least 90%, at least 91%, at least 92%, at least 93%, at least 94%, at least 95%, at least 96%, at least 97%, at least 98%, or at least 99% identical to the nucleic acid sequence of SEQ ID NO: 2403;
the sequence encoding microdystrophin comprising or consisting of a nucleic acid sequence that is at least 85%, at least 86%, at least 87%, at least 88%, at least 89%, at least 90%, at least 91%, at least 92%, at least 93%, at least 94%, at least 95%, at least 96%, at least 97%, at least 98%, or at least 99% identical to the nucleic acid sequence of SEQ ID NO: 2405; and
the at least one DRG de-targeting miRNA binding site comprising or consisting of a nucleic acid sequence that is at least 85%, at least 86%, at least 87%, at least 88%, at least 89%, at least 90%, at least 91%, at least 92%, at least 93%, at least 94%, at least 95%, at least 96%, at least 97%, at least 98%, or at least 99% identical to the nucleic acid sequence of SEQ ID NO: 2401;
(i) a recombinant nucleic acid comprising:
the promoter comprising or consisting of a nucleic acid sequence that is at least 85%, at least 86%, at least 87%, at least 88%, at least 89%, at least 90%, at least 91%, at least 92%, at least 93%, at least 94%, at least 95%, at least 96%, at least 97%, at least 98%, or at least 99% identical to the nucleic acid sequence of SEQ ID NO: 2404;
the sequence encoding microdystrophin comprising or consisting of a nucleic acid sequence that is at least 85%, at least 86%, at least 87%, at least 88%, at least 89%, at least 90%, at least 91%, at least 92%, at least 93%, at least 94%, at least 95%, at least 96%, at least 97%, at least 98%, or at least 99% identical to the nucleic acid sequence of SEQ ID NO: 2405; and
the at least one DRG de-targeting miRNA binding site comprising or consisting of a nucleic acid sequence that is at least 85%, at least 86%, at least 87%, at least 88%, at least 89%, at least 90%, at least 91%, at least 92%, at least 93%, at least 94%, at least 95%, at least 96%, at least 97%, at least 98%, or at least 99% identical to the nucleic acid sequence of SEQ ID NO: 2401;
(j) a recombinant nucleic acid comprising:
the promoter comprising or consisting of a nucleic acid sequence that is at least 85%, at least 86%, at least 87%, at least 88%, at least 89%, at least 90%, at least 91%, at least 92%, at least 93%, at least 94%, at least 95%, at least 96%, at least 97%, at least 98%, or at least 99% identical to the nucleic acid sequence of SEQ ID NO: 2402;
the sequence encoding microdystrophin comprising or consisting of a nucleic acid sequence that is at least 85%, at least 86%, at least 87%, at least 88%, at least 89%, at least 90%, at least 91%, at least 92%, at least 93%, at least 94%, at least 95%, at least 96%, at least 97%, at least 98%, or at least 99% identical to the nucleic acid sequence of SEQ ID NO: 2406; and
the at least one DRG de-targeting miRNA binding site comprising or consisting of a nucleic acid sequence that is at least 85%, at least 86%, at least 87%, at least 88%, at least 89%, at least 90%, at least 91%, at least 92%, at least 93%, at least 94%, at least 95%, at least 96%, at least 97%, at least 98%, or at least 99% identical to the nucleic acid sequence of SEQ ID NO: 2399;
(k) a recombinant nucleic acid comprising:
the promoter comprising or consisting of a nucleic acid sequence that is at least least 92%, at least 93%, at least 94%, at least 95%, at least 96%, at least 97%, at least 98%, or at least 99% identical to the nucleic acid sequence of SEQ ID NO: 2403;
the sequence encoding microdystrophin comprising or consisting of a nucleic acid sequence that is at least 85%, at least 86%, at least 87%, at least 88%, at least 89%, at least 90%, at least 91%, at least 92%, at least 93%, at least 94%, at least 95%, at least 96%, at least 97%, at least 98%, or at least 99% identical to the nucleic acid sequence of SEQ ID NO: 2406; and
the at least one DRG de-targeting miRNA binding site comprising or consisting of a nucleic acid sequence that is at least 85%, at least 86%, at least 87%, at least 88%, at least 89%, at least 90%, at least 91%, at least 92%, at least 93%, at least 94%, at least 95%, at least 96%, at least 97%, at least 98%, or at least 99% identical to the nucleic acid sequence of SEQ ID NO: 2399;
(l) a recombinant nucleic acid comprising:
the promoter comprising or consisting of a nucleic acid sequence that is at least 85%, at least 86%, at least 87%, at least 88%, at least 89%, at least 90%, at least 91%, at least 92%, at least 93%, at least 94%, at least 95%, at least 96%, at least 97%, at least 98%, or at least 99% identical to the nucleic acid sequence of SEQ ID NO: 2404;
the sequence encoding microdystrophin comprising or consisting of a nucleic acid sequence that is at least 85%, at least 86%, at least 87%, at least 88%, at least 89%, at least 90%, at least 91%, at least 92%, at least 93%, at least 94%, at least 95%, at least 96%, at least 97%, at least 98%, or at least 99% identical to the nucleic acid sequence of SEQ ID NO: 2406; and
the at least one DRG de-targeting miRNA binding site comprising or consisting of a nucleic acid sequence that is at least 85%, at least 86%, at least 87%, at least 88%, at least 89%, at least 90%, at least 91%, at least 92%, at least 93%, at least 94%, at least 95%, at least 96%, at least 97%, at least 98%, or at least 99% identical to the nucleic acid sequence of SEQ ID NO: 2399;
(m) a recombinant nucleic acid comprising:
the promoter comprising or consisting of a nucleic acid sequence that is at least least 92%, at least 93%, at least 94%, at least 95%, at least 96%, at least 97%, at least 98%, or at least 99% identical to the nucleic acid sequence of SEQ ID NO: 2402;
the sequence encoding microdystrophin comprising or consisting of a nucleic acid sequence that is at least 85%, at least 86%, at least 87%, at least 88%, at least 89%, at least 90%, at least 91%, at least 92%, at least 93%, at least 94%, at least 95%, at least 96%, at least 97%, at least 98%, or at least 99% identical to the nucleic acid sequence of SEQ ID NO: 2406; and
the at least one DRG de-targeting miRNA binding site comprising or consisting of a nucleic acid sequence that is at least 85%, at least 86%, at least 87%, at least 88%, at least 89%, at least 90%, at least 91%, at least 92%, at least 93%, at least 94%, at least 95%, at least 96%, at least 97%, at least 98%, or at least 99% identical to the nucleic acid sequence of SEQ ID NO: 2400;
(n) a recombinant nucleic acid comprising:
the promoter comprising or consisting of a nucleic acid sequence that is at least 85%, at least 86%, at least 87%, at least 88%, at least 89%, at least 90%, at least 91%, at least 92%, at least 93%, at least 94%, at least 95%, at least 96%, at least 97%, at least 98%, or at least 99% identical to the nucleic acid sequence of SEQ ID NO: 2403;
the sequence encoding microdystrophin comprising or consisting of a nucleic acid sequence that is at least 85%, at least 86%, at least 87%, at least 88%, at least 89%, at least 90%, at least 91%, at least 92%, at least 93%, at least 94%, at least 95%, at least 96%, at least 97%, at least 98%, or at least 99% identical to the nucleic acid sequence of SEQ ID NO: 2406; and
the at least one DRG de-targeting miRNA binding site comprising or consisting of a nucleic acid sequence that is at least 85%, at least 86%, at least 87%, at least 88%, at least 89%, at least 90%, at least 91%, at least 92%, at least 93%, at least 94%, at least 95%, at least 96%, at least 97%, at least 98%, or at least 99% identical to the nucleic acid sequence of SEQ ID NO: 2400;
(o) a recombinant nucleic acid comprising:
the promoter comprising or consisting of a nucleic acid sequence that is at least 85%, at least 86%, at least 87%, at least 88%, at least 89%, at least 90%, at least 91%, at least 92%, at least 93%, at least 94%, at least 95%, at least 96%, at least 97%, at least 98%, or at least 99% identical to the nucleic acid sequence of SEQ ID NO: 2404;
the sequence encoding microdystrophin comprising or consisting of a nucleic acid sequence that is at least 85%, at least 86%, at least 87%, at least 88%, at least 89%, at least 90%, at least 91%, at least 92%, at least 93%, at least 94%, at least 95%, at least 96%, at least 97%, at least 98%, or at least 99% identical to the nucleic acid sequence of SEQ ID NO: 2406; and
the at least one DRG de-targeting miRNA binding site comprising or consisting of a nucleic acid sequence that is at least 85%, at least 86%, at least 87%, at least 88%, at least 89%, at least 90%, at least 91%, at least 92%, at least 93%, at least 94%, at least 95%, at least 96%, at least 97%, at least 98%, or at least 99% identical to the nucleic acid sequence of SEQ ID NO: 2400;
(p) a recombinant nucleic acid comprising:
the promoter comprising or consisting of a nucleic acid sequence that is at least 85%, at least 86%, at least 87%, at least 88%, at least 89%, at least 90%, at least 91%, at least 92%, at least 93%, at least 94%, at least 95%, at least 96%, at least 97%, at least 98%, or at least 99% identical to the nucleic acid sequence of SEQ ID NO: 2402;
the sequence encoding microdystrophin comprising or consisting of a nucleic acid sequence that is at least 85%, at least 86%, at least 87%, at least 88%, at least 89%, at least 90%, at least 91%, at least 92%, at least 93%, at least 94%, at least 95%, at least 96%, at least 97%, at least 98%, or at least 99% identical to the nucleic acid sequence of SEQ ID NO: 2406; and
the at least one DRG de-targeting miRNA binding site comprising or consisting of a nucleic acid sequence that is at least 85%, at least 86%, at least 87%, at least 88%, at least 89%, at least 90%, at least 91%, at least 92%, at least 93%, at least 94%, at least 95%, at least 96%, at least 97%, at least 98%, or at least 99% identical to the nucleic acid sequence of SEQ ID NO: 2401;
(q) a recombinant nucleic acid comprising:
the promoter comprising or consisting of a nucleic acid sequence that is at least 85%, at least 86%, at least 87%, at least 88%, at least 89%, at least 90%, at least 91%, at least 92%, at least 93%, at least 94%, at least 95%, at least 96%, at least 97%, at least 98%, or at least 99% identical to the nucleic acid sequence of SEQ ID NO: 2403;
the sequence encoding microdystrophin comprising or consisting of a nucleic acid sequence that is at least 85%, at least 86%, at least 87%, at least 88%, at least 89%, at least 90%, at least 91%, at least 92%, at least 93%, at least 94%, at least 95%, at least 96%, at least 97%, at least 98%, or at least 99% identical to the nucleic acid sequence of SEQ ID NO: 2406; and
the at least one DRG de-targeting miRNA binding site comprising or consisting of a nucleic acid sequence that is at least 85%, at least 86%, at least 87%, at least 88%, at least 89%, at least 90%, at least 91%, at least 92%, at least 93%, at least 94%, at least 95%, at least 96%, at least 97%, at least 98%, or at least 99% identical to the nucleic acid sequence of SEQ ID NO: 2401;
(r) a recombinant nucleic acid comprising:
the promoter comprising or consisting of a nucleic acid sequence that is at least 85%, at least 86%, at least 87%, at least 88%, at least 89%, at least 90%, at least 91%, at least 92%, at least 93%, at least 94%, at least 95%, at least 96%, at least 97%, at least 98%, or at least 99% identical to the nucleic acid sequence of SEQ ID NO: 2404;
the sequence encoding microdystrophin comprising or consisting of a nucleic acid sequence that is at least 85%, at least 86%, at least 87%, at least 88%, at least 89%, at least 90%, at least 91%, at least 92%, at least 93%, at least 94%, at least 95%, at least 96%, at least 97%, at least 98%, or at least 99% identical to the nucleic acid sequence of SEQ ID NO: 2406; and
the at least one DRG de-targeting miRNA binding site comprising or consisting of a nucleic acid sequence that is at least 85%, at least 86%, at least 87%, at least 88%, at least 89%, at least 90%, at least 91%, at least 92%, at least 93%, at least 94%, at least 95%, at least 96%, at least 97%, at least 98%, or at least 99% identical to the nucleic acid sequence of SEQ ID NO: 2401;
(s) a recombinant nucleic acid comprising:
the promoter comprising or consisting of a nucleic acid sequence that is at least 85%, at least 86%, at least 87%, at least 88%, at least 89%, at least 90%, at least 91%, at least 92%, at least 93%, at least 94%, at least 95%, at least 96%, at least 97%, at least 98%, or at least 99% identical to the nucleic acid sequence of SEQ ID NO: 2402;
the sequence encoding microdystrophin comprising or consisting of a nucleic acid sequence that is at least 85%, at least 86%, at least 87%, at least 88%, at least 89%, at least 90%, at least 91%, at least 92%, at least 93%, at least 94%, at least 95%, at least 96%, at least 97%, at least 98%, or at least 99% identical to the nucleic acid sequence of SEQ ID NO: 2407; and
the at least one DRG de-targeting miRNA binding site comprising or consisting of a nucleic acid sequence that is at least 85%, at least 86%, at least 87%, at least 88%, at least 89%, at least 90%, at least 91%, at least 92%, at least 93%, at least 94%, at least 95%, at least 96%, at least 97%, at least 98%, or at least 99% identical to the nucleic acid sequence of SEQ ID NO: 2399;
(t) a recombinant nucleic acid comprising:
the promoter comprising or consisting of a nucleic acid sequence that is at least 85%, at least 86%, at least 87%, at least 88%, at least 89%, at least 90%, at least 91%, at least 92%, at least 93%, at least 94%, at least 95%, at least 96%, at least 97%, at least 98%, or at least 99% identical to the nucleic acid sequence of SEQ ID NO: 2403;
the sequence encoding microdystrophin comprising or consisting of a nucleic acid sequence that is at least 85%, at least 86%, at least 87%, at least 88%, at least 89%, at least 90%, at least 91%, at least 92%, at least 93%, at least 94%, at least 95%, at least 96%, at least 97%, at least 98%, or at least 99% identical to the nucleic acid sequence of SEQ ID NO: 2407; and
the at least one DRG de-targeting miRNA binding site comprising or consisting of a nucleic acid sequence that is at least 85%, at least 86%, at least 87%, at least 88%, at least 89%, at least 90%, at least 91%, at least 92%, at least 93%, at least 94%, at least 95%, at least 96%, at least 97%, at least 98%, or at least 99% identical to the nucleic acid sequence of SEQ ID NO: 2399;
(u) a recombinant nucleic acid comprising:
the promoter comprising or consisting of a nucleic acid sequence that is at least 85%, at least 86%, at least 87%, at least 88%, at least 89%, at least 90%, at least 91%, at least 92%, at least 93%, at least 94%, at least 95%, at least 96%, at least 97%, at least 98%, or at least 99% identical to the nucleic acid sequence of SEQ ID NO: 2404;
the sequence encoding microdystrophin comprising or consisting of a nucleic acid sequence that is at least 85%, at least 86%, at least 87%, at least 88%, at least 89%, at least 90%, at least 91%, at least 92%, at least 93%, at least 94%, at least 95%, at least 96%, at least 97%, at least 98%, or at least 99% identical to the nucleic acid sequence of SEQ ID NO: 2407; and
the at least one DRG de-targeting miRNA binding site comprising or consisting of a nucleic acid sequence that is at least 85%, at least 86%, at least 87%, at least 88%, at least 89%, at least 90%, at least 91%, at least 92%, at least 93%, at least 94%, at least 95%, at least 96%, at least 97%, at least 98%, or at least 99% identical to the nucleic acid sequence of SEQ ID NO: 2399;
(v) a recombinant nucleic acid comprising:
the promoter comprising or consisting of a nucleic acid sequence that is at least 85%, at least 86%, at least 87%, at least 88%, at least 89%, at least 90%, at least 91%, at least 92%, at least 93%, at least 94%, at least 95%, at least 96%, at least 97%, at least 98%, or at least 99% identical to the nucleic acid sequence of SEQ ID NO: 2402;
the sequence encoding microdystrophin comprising or consisting of a nucleic acid sequence that is at least 85%, at least 86%, at least 87%, at least 88%, at least 89%, at least 90%, at least 91%, at least 92%, at least 93%, at least 94%, at least 95%, at least 96%, at least 97%, at least 98%, or at least 99% identical to the nucleic acid sequence of SEQ ID NO: 2407; and
the at least one DRG de-targeting miRNA binding site comprising or consisting of a nucleic acid sequence that is at least 85%, at least 86%, at least 87%, at least 88%, at least 89%, at least 90%, at least 91%, at least 92%, at least 93%, at least 94%, at least 95%, at least 96%, at least 97%, at least 98%, or at least 99% identical to the nucleic acid sequence of SEQ ID NO: 2400;
(w) a recombinant nucleic acid comprising:
the promoter comprising or consisting of a nucleic acid sequence that is at least 85%, at least 86%, at least 87%, at least 88%, at least 89%, at least 90%, at least 91%, at least 92%, at least 93%, at least 94%, at least 95%, at least 96%, at least 97%, at least 98%, or at least 99% identical to the nucleic acid sequence of SEQ ID NO: 2403;
the sequence encoding microdystrophin comprising or consisting of a nucleic acid sequence that is at least 85%, at least 86%, at least 87%, at least 88%, at least 89%, at least 90%, at least 91%, at least 92%, at least 93%, at least 94%, at least 95%, at least 96%, at least 97%, at least 98%, or at least 99% identical to the nucleic acid sequence of SEQ ID NO: 2407; and
the at least one DRG de-targeting miRNA binding site comprising or consisting of a nucleic acid sequence that is at least 85%, at least 86%, at least 87%, at least 88%, at least 89%, at least 90%, at least 91%, at least 92%, at least 93%, at least 94%, at least 95%, at least 96%, at least 97%, at least 98%, or at least 99% identical to the nucleic acid sequence of SEQ ID NO: 2400;
(x) a recombinant nucleic acid comprising:
the promoter comprising or consisting of a nucleic acid sequence that is at least 85%, at least 86%, at least 87%, at least 88%, at least 89%, at least 90%, at least 91%, at least 92%, at least 93%, at least 94%, at least 95%, at least 96%, at least 97%, at least 98%, or at least 99% identical to the nucleic acid sequence of SEQ ID NO: 2404;
the sequence encoding microdystrophin comprising or consisting of a nucleic acid sequence that is at least 85%, at least 86%, at least 87%, at least 88%, at least 89%, at least 90%, at least 91%, at least 92%, at least 93%, at least 94%, at least 95%, at least 96%, at least 97%, at least 98%, or at least 99% identical to the nucleic acid sequence of SEQ ID NO: 2407; and
the at least one DRG de-targeting miRNA binding site comprising or consisting of a nucleic acid sequence that is at least 85%, at least 86%, at least 87%, at least 88%, at least 89%, at least 90%, at least 91%, at least 92%, at least 93%, at least 94%, at least 95%, at least 96%, at least 97%, at least 98%, or at least 99% identical to the nucleic acid sequence of SEQ ID NO: 2400;
(y) a recombinant nucleic acid comprising:
the promoter comprising or consisting of a nucleic acid sequence that is at least 85%, at least 86%, at least 87%, at least 88%, at least 89%, at least 90%, at least 91%, at least 92%, at least 93%, at least 94%, at least 95%, at least 96%, at least 97%, at least 98%, or at least 99% identical to the nucleic acid sequence of SEQ ID NO: 2402;
the sequence encoding microdystrophin comprising or consisting of a nucleic acid sequence that is at least 85%, at least 86%, at least 87%, at least 88%, at least 89%, at least 90%, at least 91%, at least 92%, at least 93%, at least 94%, at least 95%, at least 96%, at least 97%, at least 98%, or at least 99% identical to the nucleic acid sequence of SEQ ID NO: 2407; and
the at least one DRG de-targeting miRNA binding site comprising or consisting of a nucleic acid sequence that is at least 85%, at least 86%, at least 87%, at least 88%, at least 89%, at least 90%, at least 91%, at least 92%, at least 93%, at least 94%, at least 95%, at least 96%, at least 97%, at least 98%, or at least 99% identical to the nucleic acid sequence of SEQ ID NO: 2401;
(z) a recombinant nucleic acid comprising:
the promoter comprising or consisting of a nucleic acid sequence that is at least 85%, at least 86%, at least 87%, at least 88%, at least 89%, at least 90%, at least 91%, at least 92%, at least 93%, at least 94%, at least 95%, at least 96%, at least 97%, at least 98%, or at least 99% identical to the nucleic acid sequence of SEQ ID NO: 2403;
the sequence encoding microdystrophin comprising or consisting of a nucleic acid sequence that is at least 85%, at least 86%, at least 87%, at least 88%, at least 89%, at least 90%, at least 91%, at least 92%, at least 93%, at least 94%, at least 95%, at least 96%, at least 97%, at least 98%, or at least 99% identical to the nucleic acid sequence of SEQ ID NO: 2407; and
the at least one DRG de-targeting miRNA binding site comprising or consisting of a nucleic acid sequence that is at least 85%, at least 86%, at least 87%, at least 88%, at least 89%, at least 90%, at least 91%, at least 92%, at least 93%, at least 94%, at least 95%, at least 96%, at least 97%, at least 98%, or at least 99% identical to the nucleic acid sequence of SEQ ID NO: 2401; and
(aa) a recombinant nucleic acid comprising:
the promoter comprising or consisting of a nucleic acid sequence that is at least 85%, at least 86%, at least 87%, at least 88%, at least 89%, at least 90%, at least 91%, at least 92%, at least 93%, at least 94%, at least 95%, at least 96%, at least 97%, at least 98%, or at least 99% identical to the nucleic acid sequence of SEQ ID NO: 2404;
the sequence encoding microdystrophin comprising or consisting of a nucleic acid sequence that is at least 85%, at least 86%, at least 87%, at least 88%, at least 89%, at least 90%, at least 91%, at least 92%, at least 93%, at least 94%, at least 95%, at least 96%, at least 97%, at least 98%, or at least 99% identical to the nucleic acid sequence of SEQ ID NO: 2407; and
the at least one DRG de-targeting miRNA binding site comprising or consisting of a nucleic acid sequence that is at least 85%, at least 86%, at least 87%, at least 88%, at least 89%, at least 90%, at least 91%, at least 92%, at least 93%, at least 94%, at least 95%, at least 96%, at least 97%, at least 98%, or at least 99% identical to the nucleic acid sequence of SEQ ID NO: 2401.

23. The recombinant nucleic acid of claim 1, wherein the recombinant nucleic acid is selected from:
(a) a recombinant nucleic acid comprising:
the promoter comprising or consisting of the nucleic acid sequence of SEQ ID NO: 2402;
the sequence encoding microdystrophin comprising or consisting of the nucleic acid sequence of SEQ ID NO: 2405; and
the at least one DRG de-targeting miRNA binding site comprising or consisting of the nucleic acid sequence of SEQ ID NO: 2399;
(b) a recombinant nucleic acid comprising:
the promoter comprising or consisting of the nucleic acid sequence of SEQ ID NO: 2403;
the sequence encoding microdystrophin comprising or consisting of the nucleic acid sequence of SEQ ID NO: 2405; and
the at least one DRG de-targeting miRNA binding site comprising or consisting of the nucleic acid sequence of SEQ ID NO: 2399;
(c) a recombinant nucleic acid comprising:
the promoter comprising or consisting of the nucleic acid sequence of SEQ ID NO: 2404;
the sequence encoding microdystrophin comprising or consisting of the nucleic acid sequence of SEQ ID NO: 2405; and
the at least one DRG de-targeting miRNA binding site comprising or consisting of the nucleic acid sequence of SEQ ID NO: 2399;
(d) a recombinant nucleic acid comprising:
the promoter comprising or consisting of the nucleic acid sequence of SEQ ID NO: 2402;
the sequence encoding microdystrophin comprising or consisting of the nucleic acid sequence of SEQ ID NO: 2405; and
the at least one DRG de-targeting miRNA binding site comprising or consisting of the nucleic acid sequence of SEQ ID NO: 2400;
(e) a recombinant nucleic acid comprising:
the promoter comprising or consisting of the nucleic acid sequence of SEQ ID the sequence encoding microdystrophin comprising or consisting of the nucleic acid sequence of SEQ ID NO: 2405; and
the at least one DRG de-targeting miRNA binding site comprising or consisting of the nucleic acid sequence of SEQ ID NO: 2400;
(f) a recombinant nucleic acid comprising:
the promoter comprising or consisting of the nucleic acid sequence of SEQ ID NO: 2404;
the sequence encoding microdystrophin comprising or consisting of the nucleic acid sequence of SEQ ID NO: 2405; and
the at least one DRG de-targeting miRNA binding site comprising or consisting of the nucleic acid sequence of SEQ ID NO: 2400;
(g) a recombinant nucleic acid comprising:
the promoter comprising or consisting of the nucleic acid sequence of SEQ ID NO: 2402;
the sequence encoding microdystrophin comprising or consisting of the nucleic acid sequence of SEQ ID NO: 2405; and
the at least one DRG de-targeting miRNA binding site comprising or consisting of the nucleic acid sequence of SEQ ID NO: 2401;
(h) a recombinant nucleic acid comprising:
the promoter comprising or consisting of the nucleic acid sequence of SEQ ID NO: 2403;
the sequence encoding microdystrophin comprising or consisting of the nucleic acid sequence of SEQ ID NO: 2405; and
the at least one DRG de-targeting miRNA binding site comprising or consisting of the nucleic acid sequence of SEQ ID NO: 2401;
(i) a recombinant nucleic acid comprising:
the promoter comprising or consisting of the nucleic acid sequence of SEQ ID NO: 2404;
the sequence encoding microdystrophin comprising or consisting of the nucleic acid sequence of SEQ ID NO: 2405; and
the at least one DRG de-targeting miRNA binding site comprising or consisting of the nucleic acid sequence of SEQ ID NO: 2401;
(j) a recombinant nucleic acid comprising:
the promoter comprising or consisting of the nucleic acid sequence of SEQ ID NO: 2402;
the sequence encoding microdystrophin comprising or consisting of the nucleic acid sequence of SEQ ID NO: 2406; and
the at least one DRG de-targeting miRNA binding site comprising or consisting of the nucleic acid sequence of SEQ ID NO: 2399;
(k) a recombinant nucleic acid comprising:
the promoter comprising or consisting of the nucleic acid sequence of SEQ ID NO: 2403;
the sequence encoding microdystrophin comprising or consisting of the nucleic acid sequence of SEQ ID NO: 2406; and
the at least one DRG de-targeting miRNA binding site comprising or consisting of the nucleic acid sequence of SEQ ID NO: 2399;
(l) a recombinant nucleic acid comprising:
the promoter comprising or consisting of the nucleic acid sequence of SEQ ID NO: 2404;
the sequence encoding microdystrophin comprising or consisting of the nucleic acid sequence of SEQ ID NO: 2406; and
the at least one DRG de-targeting miRNA binding site comprising or consisting of the nucleic acid sequence of SEQ ID NO: 2399;
(m) a recombinant nucleic acid comprising:
the promoter comprising or consisting of the nucleic acid sequence of SEQ ID NO: 2402;
the sequence encoding microdystrophin comprising or consisting of the nucleic acid sequence of SEQ ID NO: 2406; and
the at least one DRG de-targeting miRNA binding site comprising or consisting of the nucleic acid sequence of SEQ ID NO: 2400;
(n) a recombinant nucleic acid comprising:
the promoter comprising or consisting of the nucleic acid sequence of SEQ ID NO: 2403;
the sequence encoding microdystrophin comprising or consisting of the nucleic acid sequence of SEQ ID NO: 2406; and
the at least one DRG de-targeting miRNA binding site comprising or consisting of the nucleic acid sequence of SEQ ID NO: 2400;
(o) a recombinant nucleic acid comprising:
the promoter comprising or consisting of the nucleic acid sequence of SEQ ID NO: 2404;
the sequence encoding microdystrophin comprising or consisting of the nucleic acid sequence of SEQ ID NO: 2406; and
the at least one DRG de-targeting miRNA binding site comprising or consisting of the nucleic acid sequence of SEQ ID NO: 2400;
(p) a recombinant nucleic acid comprising:
the promoter comprising or consisting of the nucleic acid sequence of SEQ ID NO: 2402;
the sequence encoding microdystrophin comprising or consisting of the nucleic acid sequence of SEQ ID NO: 2406; and
the at least one DRG de-targeting miRNA binding site comprising or consisting of the nucleic acid sequence of SEQ ID NO: 2401;
(q) a recombinant nucleic acid comprising:
the promoter comprising or consisting of the nucleic acid sequence of SEQ ID NO: 2403;
the sequence encoding microdystrophin comprising or consisting of the nucleic acid sequence of SEQ ID NO: 2406; and
the at least one DRG de-targeting miRNA binding site comprising or consisting of the nucleic acid sequence of SEQ ID NO: 2401;
(r) a recombinant nucleic acid comprising:
the promoter comprising or consisting of the nucleic acid sequence of SEQ ID NO: 2404;
the sequence encoding microdystrophin comprising or consisting of the nucleic acid sequence of SEQ ID NO: 2406; and
the at least one DRG de-targeting miRNA binding site comprising or consisting of the nucleic acid sequence of SEQ ID NO: 2401;
(s) a recombinant nucleic acid comprising:
the promoter comprising or consisting of the nucleic acid sequence of SEQ ID NO: 2402;
the sequence encoding microdystrophin comprising or consisting of the nucleic acid sequence of SEQ ID NO: 2407; and
the at least one DRG de-targeting miRNA binding site comprising or consisting of the nucleic acid sequence of SEQ ID NO: 2399;
(t) a recombinant nucleic acid comprising:
the promoter comprising or consisting of the nucleic acid sequence of SEQ ID NO: 2403;
the sequence encoding microdystrophin comprising or consisting of the nucleic acid sequence of SEQ ID NO: 2407; and
the at least one DRG de-targeting miRNA binding site comprising or consisting of the nucleic acid sequence of SEQ ID NO: 2399;
(u) a recombinant nucleic acid comprising:
the promoter comprising or consisting of the nucleic acid sequence of SEQ ID NO: 2404;
the sequence encoding microdystrophin comprising or consisting of the nucleic acid sequence of SEQ ID NO: 2407; and
the at least one DRG de-targeting miRNA binding site comprising or consisting of the nucleic acid sequence of SEQ ID NO: 2399;
(v) a recombinant nucleic acid comprising:
the promoter comprising or consisting of the nucleic acid sequence of SEQ ID NO: 2402;
the sequence encoding microdystrophin comprising or consisting of the nucleic acid sequence of SEQ ID NO: 2407; and
the at least one DRG de-targeting miRNA binding site comprising or consisting of the nucleic acid sequence of SEQ ID NO: 2400;
(w) a recombinant nucleic acid comprising:
the promoter comprising or consisting of the nucleic acid sequence of SEQ ID NO: 2403;
the sequence encoding microdystrophin comprising or consisting of the nucleic acid sequence of SEQ ID NO: 2407; and
the at least one DRG de-targeting miRNA binding site comprising or consisting of the nucleic acid sequence of SEQ ID NO: 2400;
(x) a recombinant nucleic acid comprising:
the promoter comprising or consisting of the nucleic acid sequence of SEQ ID NO: 2404;
the sequence encoding microdystrophin comprising or consisting of the nucleic acid sequence of SEQ ID NO: 2407; and
the at least one DRG de-targeting miRNA binding site comprising or consisting of the nucleic acid sequence of SEQ ID NO: 2400;
(y) a recombinant nucleic acid comprising:
the promoter comprising or consisting of the nucleic acid sequence of SEQ ID NO: 2402;
the sequence encoding microdystrophin comprising or consisting of the nucleic acid sequence of SEQ ID NO: 2407; and
the at least one DRG de-targeting miRNA binding site comprising or consisting of the nucleic acid sequence of SEQ ID NO: 2401;
(z) a recombinant nucleic acid comprising:
the promoter comprising or consisting of the nucleic acid sequence of SEQ ID NO: 2403;
the sequence encoding microdystrophin comprising or consisting of the nucleic acid sequence of SEQ ID NO: 2407; and
the at least one DRG de-targeting miRNA binding site comprising or consisting of the nucleic acid sequence of SEQ ID NO: 2401; and
(aa) a recombinant nucleic acid comprising:
the promoter comprising or consisting of the nucleic acid sequence of SEQ ID NO: 2404;
the sequence encoding microdystrophin comprising or consisting of the nucleic acid sequence of SEQ ID NO: 2407; and
the at least one DRG de-targeting miRNA binding site comprising or consisting of the nucleic acid sequence of SEQ ID NO: 2401.

24. The recombinant nucleic acid of claim 1, further comprising an intron.

25.-27. (canceled)

28. The recombinant nucleic acid of claim 1, further comprising a polyadenylation (PolyA) signal.

29.-31. (canceled)

32. The recombinant nucleic acid of claim 1, further comprising a 5′ inverted terminal repeat (ITR) and a 3′ ITR.

33.-37. (canceled)

38. The recombinant nucleic acid of claim 1, wherein the recombinant nucleic acid comprises, optionally from 5′ to 3′:
a 5′ ITR;
a promoter;
an intron;
a sequence encoding microdystrophin;
a first DRG de-targeting miRNA binding site;
a second DRG de-targeting miRNA binding site;
a PolyA signal; and
a 3′ ITR.

39. The recombinant nucleic acid of claim 38, wherein:
the 5′ ITR comprises or consists of a nucleic acid sequence that is at least 85%, at least 86%, at least 87%, at least 88%, at least 89%, at least 90%, at least 91%, at least 92%, at least 93%, at least 94%, at least 95%, at least 96%, at least 97%, at least 98%, or at least 99% identical to the nucleic acid sequence of SEQ ID NO: 2408;
the promoter comprises or consists of a nucleic acid sequence that is at least 85%, at least 86%, at least 87%, at least 88%, at least 89%, at least 90%, at least 91%, at least 92%, at least 93%, at least 94%, at least 95%, at least 96%, at least 97%, at least 98%, or at least 99% identical to the nucleic acid sequence of any one of SEQ ID NOs: 2402-2404;
the intron comprises or consists of a nucleic acid sequence that is at least 85%, at least 86%, at least 87%, at least 88%, at least 89%, at least 90%, at least 91%, at least 92%, at least 93%, at least 94%, at least 95%, at least 96%, at least 97%, at least 98%, or at least 99% identical to the nucleic acid sequence of SEQ ID NO: 2409;
the sequence encoding microdystrophin comprises or consists of a nucleic acid sequence that is at least 85%, at least 86%, at least 87%, at least 88%, at least 89%, at least 90%, at least 91%, at least 92%, at least 93%, at least 94%, at least 95%, at least 96%, at least 97%, at least 98%, or at least 99% identical to the nucleic acid sequence of any one of SEQ ID NOs: 2405-2407;
the first DRG de-targeting miRNA binding site comprises or consists of a nucleic acid sequence that is at least 85%, at least 86%, at least 87%, at least 88%, at least 89%, at least 90%, at least 91%, at least 92%, at least 93%, at least 94%, at least 95%, at least 96%, at least 97%, at least 98%, or at least 99% identical to the nucleic acid sequence of any one of SEQ ID NOs: 2399-2401;
the second DRG de-targeting miRNA binding site comprises or consists of a nucleic acid sequence that is at least 85%, at least 86%, at least 87%, at least 88%, at least 89%, at least 90%, at least 91%, at least 92%, at least 93%, at least 94%, at least 95%, at least 96%, at least 97%, at least 98%, or at least 99% identical to the nucleic acid sequence of any one of SEQ ID NOs: 2399-2401;
the PolyA signal comprises or consists of a nucleic acid sequence that is at least 85%, at least 86%, at least 87%, at least 88%, at least 89%, at least 90%, at least 91%, at least 92%, at least 93%, at least 94%, at least 95%, at least 96%, at least 97%, at least 98%, or at least 99% identical to the nucleic acid sequence of SEQ ID NO: 2410; and
the 3′ ITR comprises or consists of a nucleic acid sequence that is at least 85%, at least 86%, at least 87%, at least 88%, at least 89%, at least 90%, at least 91%, at least 92%, at least 93%, at least 94%, at least 95%, at least 96%, at least 97%, at least 98%, or at least 99% identical to the nucleic acid sequence of SEQ ID NO: 2411.

40. The recombinant nucleic acid of claim 38, wherein the recombinant nucleic acid is selected from:
(a) a recombinant nucleic acid comprising:
the 5′ ITR comprising or consisting of a nucleic acid sequence that is at least 85%, 92%, at least 93%, at least 94%, at least 95%, at least 96%, at least 97%, at least 98%, or at least 99% identical to the nucleic acid sequence of SEQ ID NO: 2408;
the promoter comprising or consisting of a nucleic acid sequence that is at least 85%, at least 86%, at least 87%, at least 88%, at least 89%, at least 90%, at least 91%, at least 92%, at least 93%, at least 94%, at least 95%, at least 96%, at least 97%, at least 98%, or at least 99% identical to the nucleic acid sequence of SEQ ID NO: 2402;
the intron comprising or consisting of a nucleic acid sequence that is at least 85%, at least 86%, at least 87%, at least 88%, at least 89%, at least 90%, at least 91%, at least 92%, at least 93%, at least 94%, at least 95%, at least 96%, at least 97%, at least 98%, or at least 99% identical to the nucleic acid sequence of SEQ ID NO: 2409;
the sequence encoding microdystrophin comprising or consisting of a nucleic acid sequence that is at least 85%, at least 86%, at least 87%, at least 88%, at least 89%, at least 90%, at least 91%, at least 92%, at least 93%, at least 94%, at least 95%, at least 96%, at least 97%, at least 98%, or at least 99% identical to the nucleic acid sequence of SEQ ID NO: 2405; and
the first DRG de-targeting miRNA binding site comprising or consisting of a nucleic acid sequence that is at least 85%, at least 86%, at least 87%, at least 88%, at least 89%, at least 90%, at least 91%, at least 92%, at least 93%, at least 94%, at least 95%, at least 96%, at least 97%, at least 98%, or at least 99% identical to the nucleic acid sequence of SEQ ID NO: 2399;
the second DRG de-targeting miRNA binding site comprising or consisting of a nucleic acid sequence that is at least 85%, at least 86%, at least 87%, at least 88%, at least 89%, at least 90%, at least 91%, at least 92%, at least 93%, at least 94%, at least 95%, at least 96%, at least 97%, at least 98%, or at least 99% identical to the nucleic acid sequence of SEQ ID NO: 2399;
the PolyA signal comprising or consisting of a nucleic acid sequence that is at least 85%, at least 86%, at least 87%, at least 88%, at least 89%, at least 90%, at least 91%, at least 92%, at least 93%, at least 94%, at least 95%, at least 96%, at least 97%, at least 98%, or at least 99% identical to the nucleic acid sequence of SEQ ID NO: 2410; and
the 3′ ITR comprising or consisting of a nucleic acid sequence that is at least 85%, at least 86%, at least 87%, at least 88%, at least 89%, at least 90%, at least 91%, at least 92%, at least 93%, at least 94%, at least 95%, at least 96%, at least 97%, at least 98%, or at least 99% identical to the nucleic acid sequence of SEQ ID NO: 2411;
(b) a recombinant nucleic acid comprising:
the 5′ ITR comprising or consisting of a nucleic acid sequence that is at least 85%, at least 86%, at least 87%, at least 88%, at least 89%, at least 90%, at least 91%, at least 92%, at least 93%, at least 94%, at least 95%, at least 96%, at least 97%, at least 98%, or at least 99% identical to the nucleic acid sequence of SEQ ID NO: 2408;
the promoter comprising or consisting of a nucleic acid sequence that is at least 85%, at least 86%, at least 87%, at least 88%, at least 89%, at least 90%, at least 91%, at least 92%, at least 93%, at least 94%, at least 95%, at least 96%, at least 97%, at least 98%, or at least 99% identical to the nucleic acid sequence of SEQ ID NO: 2403;
the intron comprising or consisting of a nucleic acid sequence that is at least 85%, at least 86%, at least 87%, at least 88%, at least 89%, at least 90%, at least 91%, at least 92%, at least 93%, at least 94%, at least 95%, at least 96%, at least 97%, at least 98%, or at least 99% identical to the nucleic acid sequence of SEQ ID NO: 2409;
the sequence encoding microdystrophin comprising or consisting of a nucleic acid sequence that is at least 85%, at least 86%, at least 87%, at least 88%, at least 89%, at least 90%, at least 91%, at least 92%, at least 93%, at least 94%, at least 95%, at least 96%, at least 97%, at least 98%, or at least 99% identical to the nucleic acid sequence of SEQ ID NO: 2405;
the first DRG de-targeting miRNA binding site comprising or consisting of a nucleic acid sequence that is at least 85%, at least 86%, at least 87%, at least 88%, at least 89%, at least 90%, at least 91%, at least 92%, at least 93%, at least 94%, at least 95%, at least 96%, at least 97%, at least 98%, or at least 99% identical to the nucleic acid sequence of SEQ ID NO: 2399;
the second DRG de-targeting miRNA binding site comprising or consisting of a nucleic acid sequence that is at least 85%, at least 86%, at least 87%, at least 88%, at least 89%, at least 90%, at least 91%, at least 92%, at least 93%, at least 94%, at least 95%, at least 96%, at least 97%, at least 98%, or at least 99% identical to the nucleic acid sequence of SEQ ID NO: 2399;
the PolyA signal comprising or consisting of a nucleic acid sequence that is at least 85%, at least 86%, at least 87%, at least 88%, at least 89%, at least 90%, at least 91%, at least 92%, at least 93%, at least 94%, at least 95%, at least 96%, at least 97%, at least 98%, or at least 99% identical to the nucleic acid sequence of SEQ ID NO: 2410; and
the 3′ ITR comprising or consisting of a nucleic acid sequence that is at least 85%, at least 86%, at least 87%, at least 88%, at least 89%, at least 90%, at least 91%, at least 92%, at least 93%, at least 94%, at least 95%, at least 96%, at least 97%, at least 98%, or at least 99% identical to the nucleic acid sequence of SEQ ID NO: 2411;
(c) a recombinant nucleic acid comprising:
the 5′ ITR comprising or consisting of a nucleic acid sequence that is at least 85%, at least 86%, at least 87%, at least 88%, at least 89%, at least 90%, at least 91%, at least 92%, at least 93%, at least 94%, at least 95%, at least 96%, at least 97%, at least 98%, or at least 99% identical to the nucleic acid sequence of SEQ ID NO: 2408;
the promoter comprising or consisting of a nucleic acid sequence that is at least 85%, at least 86%, at least 87%, at least 88%, at least 89%, at least 90%, at least 91%, at least 92%, at least 93%, at least 94%, at least 95%, at least 96%, at least 97%, at least 98%, or at least 99% identical to the nucleic acid sequence of SEQ ID NO: 2404;
the intron comprising or consisting of a nucleic acid sequence that is at least 85%, at least 86%, at least 87%, at least 88%, at least 89%, at least 90%, at least 91%, at least 92%, at least 93%, at least 94%, at least 95%, at least 96%, at least 97%, at least 98%, or at least 99% identical to the nucleic acid sequence of SEQ ID NO: 2409;
the sequence encoding microdystrophin comprising or consisting of a nucleic acid sequence that is at least 85%, at least 86%, at least 87%, at least 88%, at least 89%, at least 90%, at least 91%, at least 92%, at least 93%, at least 94%, at least 95%, at least 96%, at least 97%, at least 98%, or at least 99% identical to the nucleic acid sequence of SEQ ID NO: 2405;
the first DRG de-targeting miRNA binding site comprising or consisting of a nucleic acid sequence that is at least 85%, at least 86%, at least 87%, at least 88%, at least 89%, at least 90%, at least 91%, at least 92%, at least 93%, at least 94%, at least 95%, at least 96%, at least 97%, at least 98%, or at least 99% identical to the nucleic acid sequence of SEQ ID NO: 2399;
the second DRG de-targeting miRNA binding site comprising or consisting of a nucleic acid sequence that is at least 85%, at least 86%, at least 87%, at least 88%, at least 89%, at least 90%, at least 91%, at least 92%, at least 93%, at least 94%, at least 95%, at least 96%, at least 97%, at least 98%, or at least 99% identical to the nucleic acid sequence of SEQ ID NO: 2399;
the PolyA signal comprising or consisting of a nucleic acid sequence that is at least 85%, at least 86%, at least 87%, at least 88%, at least 89%, at least 90%, at least 91%, at least 92%, at least 93%, at least 94%, at least 95%, at least 96%, at least 97%, at least 98%, or at least 99% identical to the nucleic acid sequence of SEQ ID NO: 2410; and
the 3′ ITR comprising or consisting of a nucleic acid sequence that is at least 85%, at least 86%, at least 87%, at least 88%, at least 89%, at least 90%, at least 91%, at least 92%, at least 93%, at least 94%, at least 95%, at least 96%, at least 97%, at least 98%, or at least 99% identical to the nucleic acid sequence of SEQ ID NO: 2411;
(d) a recombinant nucleic acid comprising:
the 5′ ITR comprising or consisting of a nucleic acid sequence that is at least 85%, at least 86%, at least 87%, at least 88%, at least 89%, at least 90%, at least 91%, at least 92%, at least 93%, at least 94%, at least 95%, at least 96%, at least 97%, at least 98%, or at least 99% identical to the nucleic acid sequence of SEQ ID NO: 2408;
the promoter comprising or consisting of a nucleic acid sequence that is at least least 92%, at least 93%, at least 94%, at least 95%, at least 96%, at least 97%, at least 98%, or at least 99% identical to the nucleic acid sequence of SEQ ID NO: 2402;
the intron comprises or consists of a nucleic acid sequence that is at least 85%, at least 86%, at least 87%, at least 88%, at least 89%, at least 90%, at least 91%, at least 92%, at least 93%, at least 94%, at least 95%, at least 96%, at least 97%, at least 98%, or at least 99% identical to the nucleic acid sequence of SEQ ID NO: 2409;
the sequence encoding microdystrophin comprising or consisting of a nucleic acid sequence that is at least 85%, at least 86%, at least 87%, at least 88%, at least 89%, at least 90%, at least 91%, at least 92%, at least 93%, at least 94%, at least 95%, at least 96%, at least 97%, at least 98%, or at least 99% identical to the nucleic acid sequence of SEQ ID NO: 2405;
the first DRG de-targeting miRNA binding site comprising or consisting of a nucleic acid sequence that is at least 85%, at least 86%, at least 87%, at least 88%, at least 89%, at least 90%, at least 91%, at least 92%, at least 93%, at least 94%, at least 95%, at least 96%, at least 97%, at least 98%, or at least 99% identical to the nucleic acid sequence of SEQ ID NO: 2400;
the second DRG de-targeting miRNA binding site comprising or consisting of a nucleic acid sequence that is at least 85%, at least 86%, at least 87%, at least 88%, at least 89%, at least 90%, at least 91%, at least 92%, at least 93%, at least 94%, at least 95%, at least 96%, at least 97%, at least 98%, or at least 99% identical to the nucleic acid sequence of SEQ ID NO: 2400;
the PolyA signal comprising or consisting of a nucleic acid sequence that is at least 85%, at least 86%, at least 87%, at least 88%, at least 89%, at least 90%, at least 91%, at least 92%, at least 93%, at least 94%, at least 95%, at least 96%, at least 97%, at least 98%, or at least 99% identical to the nucleic acid sequence of SEQ ID NO: 2410; and
the 3′ ITR comprising or consisting of a nucleic acid sequence that is at least 85%, at least 86%, at least 87%, at least 88%, at least 89%, at least 90%, at least 92%, at least 93%, at least 94%, at least 95%, at least 96%, at least 97%, at least 98%, or at least 99% identical to the nucleic acid sequence of SEQ ID NO: 2411;
(e) a recombinant nucleic acid comprising:
the 5′ ITR comprising or consisting of a nucleic acid sequence that is at least 85%, at least 86%, at least 87%, at least 88%, at least 89%, at least 90%, at least 91%, at least 92%, at least 93%, at least 94%, at least 95%, at least 96%, at least 97%, at least 98%, or at least 99% identical to the nucleic acid sequence of SEQ ID NO: 2408;
the promoter comprising or consisting of a nucleic acid sequence that is at least 85%, at least 86%, at least 87%, at least 88%, at least 89%, at least 90%, at least 91%, at least 92%, at least 93%, at least 94%, at least 95%, at least 96%, at least 97%, at least 98%, or at least 99% identical to the nucleic acid sequence of SEQ ID NO: 2403;
the intron comprising or consisting of a nucleic acid sequence that is at least 85%, at least 86%, at least 87%, at least 88%, at least 89%, at least 90%, at least 91%, at least 92%, at least 93%, at least 94%, at least 95%, at least 96%, at least 97%, at least 98%, or at least 99% identical to the nucleic acid sequence of SEQ ID NO: 2409;
the sequence encoding microdystrophin comprising or consisting of a nucleic acid sequence that is at least 85%, at least 86%, at least 87%, at least 88%, at least 89%, at least 90%, at least 91%, at least 92%, at least 93%, at least 94%, at least 95%, at least 96%, at least 97%, at least 98%, or at least 99% identical to the nucleic acid sequence of SEQ ID NO: 2405;
the first DRG de-targeting miRNA binding site comprising or consisting of a nucleic acid sequence that is at least 85%, at least 86%, at least 87%, at least 88%, at least 89%, at least 90%, at least 91%, at least 92%, at least 93%, at least 94%, at least 95%, at least 96%, at least 97%, at least 98%, or at least 99% identical to the nucleic acid sequence of SEQ ID NO: 2400;
the second DRG de-targeting miRNA binding site comprising or consisting of a nucleic acid sequence that is at least 85%, at least 86%, at least 87%, at least 88%, at least 89%, at least 90%, at least 91%, at least 92%, at least 93%, at least 94%, at least 95%, at least 96%, at least 97%, at least 98%, or at least 99% identical to the nucleic acid sequence of SEQ ID NO: 2400;
the PolyA signal comprising or consisting of a nucleic acid sequence that is at least 85%, at least 86%, at least 87%, at least 88%, at least 89%, at least 90%, at least 91%, at least 92%, at least 93%, at least 94%, at least 95%, at least 96%, at least 97%, at least 98%, or at least 99% identical to the nucleic acid sequence of SEQ ID NO: 2410; and
the 3′ ITR comprising or consisting of a nucleic acid sequence that is at least 85%, at least 86%, at least 87%, at least 88%, at least 89%, at least 90%, at least 91%, at least 92%, at least 93%, at least 94%, at least 95%, at least 96%, at least 97%, at least 98%, or at least 99% identical to the nucleic acid sequence of SEQ ID NO: 2411;
(f) a recombinant nucleic acid comprising:
the 5′ ITR comprising or consisting of a nucleic acid sequence that is at least 85%, at least 86%, at least 87%, at least 88%, at least 89%, at least 90%, at least 91%, at least 92%, at least 93%, at least 94%, at least 95%, at least 96%, at least 97%, at least 98%, or at least 99% identical to the nucleic acid sequence of SEQ ID NO: 2408;
the promoter comprising or consisting of a nucleic acid sequence that is at least 85%, at least 86%, at least 87%, at least 88%, at least 89%, at least 90%, at least 91%, at least 92%, at least 93%, at least 94%, at least 95%, at least 96%, at least 97%, at least 98%, or at least 99% identical to the nucleic acid sequence of SEQ ID NO: 2404;
the intron comprises or consists of a nucleic acid sequence that is at least 85%, at least 86%, at least 87%, at least 88%, at least 89%, at least 90%, at least 91%, at least 92%, at least 93%, at least 94%, at least 95%, at least 96%, at least 97%, at least 98%, or at least 99% identical to the nucleic acid sequence of SEQ ID NO: 2409;
the sequence encoding microdystrophin comprising or consisting of a nucleic acid sequence that is at least 85%, at least 86%, at least 87%, at least 88%, at least 89%, at least 90%, at least 91%, at least 92%, at least 93%, at least 94%, at least 95%, at least 96%, at least 97%, at least 98%, or at least 99% identical to the nucleic acid sequence of SEQ ID NO: 2405;
the first DRG de-targeting miRNA binding site comprising or consisting of a nucleic acid sequence that is at least 85%, at least 86%, at least 87%, at least 88%, at least 89%, at least 90%, at least 91%, at least 92%, at least 93%, at least 94%, at least 95%, at least 96%, at least 97%, at least 98%, or at least 99% identical to the nucleic acid sequence of SEQ ID NO: 2400;
the second DRG de-targeting miRNA binding site comprising or consisting of a nucleic acid sequence that is at least 85%, at least 86%, at least 87%, at least 88%, at least 89%, at least 90%, at least 91%, at least 92%, at least 93%, at least 94%, at least 95%, at least 96%, at least 97%, at least 98%, or at least 99% identical to the nucleic acid sequence of SEQ ID NO: 2400;
the PolyA signal comprising or consisting of a nucleic acid sequence that is at least 85%, at least 86%, at least 87%, at least 88%, at least 89%, at least 90%, at least 91%, at least 92%, at least 93%, at least 94%, at least 95%, at least 96%, at least 97%, at least 98%, or at least 99% identical to the nucleic acid sequence of SEQ ID NO: 2410; and
the 3′ ITR comprising or consisting of a nucleic acid sequence that is at least 85%, at least 86%, at least 87%, at least 88%, at least 89%, at least 90%, at least 91%, at least 92%, at least 93%, at least 94%, at least 95%, at least 96%, at least 97%, at least 98%, or at least 99% identical to the nucleic acid sequence of SEQ ID NO: 2411;
(g) a recombinant nucleic acid comprising:
the 5′ ITR comprising or consisting of a nucleic acid sequence that is at least 85%, at least 86%, at least 87%, at least 88%, at least 89%, at least 90%, at least 91%, at least 92%, at least 93%, at least 94%, at least 95%, at least 96%, at least 97%, at least 98%, or at least 99% identical to the nucleic acid sequence of SEQ ID NO: 2408;
the promoter comprising or consisting of a nucleic acid sequence that is at least least 92%, at least 93%, at least 94%, at least 95%, at least 96%, at least 97%, at least 98%, or at least 99% identical to the nucleic acid sequence of SEQ ID NO: 2402;
the intron comprising or consisting of a nucleic acid sequence that is at least 85%, at least 86%, at least 87%, at least 88%, at least 89%, at least 90%, at least 91%, at least 92%, at least 93%, at least 94%, at least 95%, at least 96%, at least 97%, at least 98%, or at least 99% identical to the nucleic acid sequence of SEQ ID NO: 2409;
the sequence encoding microdystrophin comprising or consisting of a nucleic acid sequence that is at least 85%, at least 86%, at least 87%, at least 88%, at least 89%, at least 90%, at least 91%, at least 92%, at least 93%, at least 94%, at least 95%, at least 96%, at least 97%, at least 98%, or at least 99% identical to the nucleic acid sequence of SEQ ID NO: 2405;
the first DRG de-targeting miRNA binding site comprising or consisting of a nucleic acid sequence that is at least 85%, at least 86%, at least 87%, at least 88%, at least 89%, at least 90%, at least 91%, at least 92%, at least 93%, at least 94%, at least 95%, at least 96%, at least 97%, at least 98%, or at least 99% identical to the nucleic acid sequence of SEQ ID NO: 2401;
the second DRG de-targeting miRNA binding site comprising or consisting of a nucleic acid sequence that is at least 85%, at least 86%, at least 87%, at least 88%, at least 89%, at least 90%, at least 91%, at least 92%, at least 93%, at least 94%, at least 95%, at least 96%, at least 97%, at least 98%, or at least 99% identical to the nucleic acid sequence of SEQ ID NO: 2401;
the PolyA signal comprising or consisting of a nucleic acid sequence that is at least 85%, at least 86%, at least 87%, at least 88%, at least 89%, at least 90%, at least 91%, at least 92%, at least 93%, at least 94%, at least 95%, at least 96%, at least 97%, at least 98%, or at least 99% identical to the nucleic acid sequence of SEQ ID NO: 2410; and
the 3′ ITR comprising or consisting of a nucleic acid sequence that is at least 85%, 92%, at least 93%, at least 94%, at least 95%, at least 96%, at least 97%, at least 98%, or at least 99% identical to the nucleic acid sequence of SEQ ID NO: 2411;
(h) a recombinant nucleic acid comprising:
the 5′ ITR comprising or consisting of a nucleic acid sequence that is at least 85%, at least 86%, at least 87%, at least 88%, at least 89%, at least 90%, at least 91%, at least 92%, at least 93%, at least 94%, at least 95%, at least 96%, at least 97%, at least 98%, or at least 99% identical to the nucleic acid sequence of SEQ ID NO: 2408;
the promoter comprising or consisting of a nucleic acid sequence that is at least 85%, at least 86%, at least 87%, at least 88%, at least 89%, at least 90%, at least 91%, at least 92%, at least 93%, at least 94%, at least 95%, at least 96%, at least 97%, at least 98%, or at least 99% identical to the nucleic acid sequence of SEQ ID NO: 2403;
the intron comprising or consisting of a nucleic acid sequence that is at least 85%, at least 86%, at least 87%, at least 88%, at least 89%, at least 90%, at least 91%, at least 92%, at least 93%, at least 94%, at least 95%, at least 96%, at least 97%, at least 98%, or at least 99% identical to the nucleic acid sequence of SEQ ID NO: 2409;
the sequence encoding microdystrophin comprising or consisting of a nucleic acid sequence that is at least 85%, at least 86%, at least 87%, at least 88%, at least 89%, at least 90%, at least 91%, at least 92%, at least 93%, at least 94%, at least 95%, at least 96%, at least 97%, at least 98%, or at least 99% identical to the nucleic acid sequence of SEQ ID NO: 2405;
the first DRG de-targeting miRNA binding site comprising or consisting of a nucleic acid sequence that is at least 85%, at least 86%, at least 87%, at least 88%, at least 89%, at least 90%, at least 91%, at least 92%, at least 93%, at least 94%, at least 95%, at least 96%, at least 97%, at least 98%, or at least 99% identical to the nucleic acid sequence of SEQ ID NO: 2401;
the second DRG de-targeting miRNA binding site comprising or consisting of a nucleic acid sequence that is at least 85%, at least 86%, at least 87%, at least 88%, at least 89%, at least 90%, at least 91%, at least 92%, at least 93%, at least 94%, at least 95%, at least 96%, at least 97%, at least 98%, or at least 99% identical to the nucleic acid sequence of SEQ ID NO: 2401;
the PolyA signal comprising or consisting of a nucleic acid sequence that is at least 85%, at least 86%, at least 87%, at least 88%, at least 89%, at least 90%, at least 91%, at least 92%, at least 93%, at least 94%, at least 95%, at least 96%, at least 97%, at least 98%, or at least 99% identical to the nucleic acid sequence of SEQ ID NO: 2410; and
the 3′ ITR comprising or consisting of a nucleic acid sequence that is at least 85%, at least 86%, at least 87%, at least 88%, at least 89%, at least 90%, at least 91%, at least 92%, at least 93%, at least 94%, at least 95%, at least 96%, at least 97%, at least 98%, or at least 99% identical to the nucleic acid sequence of SEQ ID NO: 2411;
(i) a recombinant nucleic acid comprising:
the 5′ ITR comprising or consisting of a nucleic acid sequence that is at least 85%, at least 86%, at least 87%, at least 88%, at least 89%, at least 90%, at least 91%, at least 92%, at least 93%, at least 94%, at least 95%, at least 96%, at least 97%, at least 98%, or at least 99% identical to the nucleic acid sequence of SEQ ID NO: 2408;
the promoter comprising or consisting of a nucleic acid sequence that is at least 85%, at least 86%, at least 87%, at least 88%, at least 89%, at least 90%, at least 91%, at least 92%, at least 93%, at least 94%, at least 95%, at least 96%, at least 97%, at least 98%, or at least 99% identical to the nucleic acid sequence of SEQ ID NO: 2404;
the intron comprises or consists of a nucleic acid sequence that is at least 85%, at least 86%, at least 87%, at least 88%, at least 89%, at least 90%, at least 91%, at least 92%, at least 93%, at least 94%, at least 95%, at least 96%, at least 97%, at least 98%, or at least 99% identical to the nucleic acid sequence of SEQ ID NO: 2409;
the sequence encoding microdystrophin comprising or consisting of a nucleic acid sequence that is at least 85%, at least 86%, at least 87%, at least 88%, at least 89%, at least 90%, at least 91%, at least 92%, at least 93%, at least 94%, at least 95%, at least 96%, at least 97%, at least 98%, or at least 99% identical to the nucleic acid sequence of SEQ ID NO: 2405;
the first DRG de-targeting miRNA binding site comprising or consisting of a nucleic acid sequence that is at least 85%, at least 86%, at least 87%, at least 88%, at least 89%, at least 90%, at least 91%, at least 92%, at least 93%, at least 94%, at least 95%, at least 96%, at least 97%, at least 98%, or at least 99% identical to the nucleic acid sequence of SEQ ID NO: 2401;
the second DRG de-targeting miRNA binding site comprising or consisting of a nucleic acid sequence that is at least 85%, at least 86%, at least 87%, at least 88%, at least 89%, at least 90%, at least 91%, at least 92%, at least 93%, at least 94%, at least 95%, at least 96%, at least 97%, at least 98%, or at least 99% identical to the nucleic acid sequence of SEQ ID NO: 2401;
the PolyA signal comprising or consisting of a nucleic acid sequence that is at least 85%, at least 86%, at least 87%, at least 88%, at least 89%, at least 90%, at least 91%, at least 92%, at least 93%, at least 94%, at least 95%, at least 96%, at least 97%, at least 98%, or at least 99% identical to the nucleic acid sequence of SEQ ID NO: 2410; and
the 3′ ITR comprising or consisting of a nucleic acid sequence that is at least 85%, at least 86%, at least 87%, at least 88%, at least 89%, at least 90%, at least 91%, at least 92%, at least 93%, at least 94%, at least 95%, at least 96%, at least 97%, at least 98%, or at least 99% identical to the nucleic acid sequence of SEQ ID NO: 2411;
(j) a recombinant nucleic acid comprising:
the 5′ITR comprising or consisting of a nucleic acid sequence that is at least 85%, at least 86%, at least 87%, at least 88%, at least 89%, at least 90%, at least 91%, at least 92%, at least 93%, at least 94%, at least 95%, at least 96%, at least 97%, at least 98%, or at least 99% identical to the nucleic acid sequence of SEQ ID NO: 2408;
the promoter comprising or consisting of a nucleic acid sequence that is at least 85%, at least 86%, at least 87%, at least 88%, at least 89%, at least 90%, at least 91%, at least 92%, at least 93%, at least 94%, at least 95%, at least 96%, at least 97%, at least 98%, or at least 99% identical to the nucleic acid sequence of SEQ ID NO: 2402;
the intron comprises or consists of a nucleic acid sequence that is at least 85%, at least 86%, at least 87%, at least 88%, at least 89%, at least 90%, at least 91%, at least 92%, at least 93%, at least 94%, at least 95%, at least 96%, at least 97%, at least 98%, or at least 99% identical to the nucleic acid sequence of SEQ ID NO: 2409;
the sequence encoding microdystrophin comprising or consisting of a nucleic acid sequence that is at least 85%, at least 86%, at least 87%, at least 88%, at least 89%, at least 90%, at least 91%, at least 92%, at least 93%, at least 94%, at least 95%, at least 96%, at least 97%, at least 98%, or at least 99% identical to the nucleic acid sequence of SEQ ID NO: 2406;
the first DRG de-targeting miRNA binding site comprising or consisting of a nucleic acid sequence that is at least 85%, at least 86%, at least 87%, at least 88%, at least 89%, at least 90%, at least 91%, at least 92%, at least 93%, at least 94%, at least 95%, at least 96%, at least 97%, at least 98%, or at least 99% identical to the nucleic acid sequence of SEQ ID NO: 2399;
the second DRG de-targeting miRNA binding site comprising or consisting of a nucleic acid sequence that is at least 85%, at least 86%, at least 87%, at least 88%, at least 89%, at least 90%, at least 91%, at least 92%, at least 93%, at least 94%, at least 95%, at least 96%, at least 97%, at least 98%, or at least 99% identical to the nucleic acid sequence of SEQ ID NO: 2399;
the PolyA signal comprising or consisting of a nucleic acid sequence that is at least 85%, at least 86%, at least 87%, at least 88%, at least 89%, at least 90%, at least 91%, at least 92%, at least 93%, at least 94%, at least 95%, at least 96%, at least 97%, at least 98%, or at least 99% identical to the nucleic acid sequence of SEQ ID NO: 2410; and
the 3′ ITR comprising or consisting of a nucleic acid sequence that is at least 85%, at least 86%, at least 87%, at least 88%, at least 89%, at least 90%, at least 91%, at least 92%, at least 93%, at least 94%, at least 95%, at least 96%, at least 97%, at least 98%, or at least 99% identical to the nucleic acid sequence of SEQ ID NO: 2411;
(k) a recombinant nucleic acid comprising:
the 5′ comprising or consisting of a nucleic acid sequence that is at least 85%, at least 86%, at least 87%, at least 88%, at least 89%, at least 90%, at least 91%, at least 92%, at least 93%, at least 94%, at least 95%, at least 96%, at least 97%, at least 98%, or at least 99% identical to the nucleic acid sequence of SEQ ID NO: 2408;
the promoter comprising or consisting of a nucleic acid sequence that is at least 85%, at least 86%, at least 87%, at least 88%, at least 89%, at least 90%, at least 91%, at least 92%, at least 93%, at least 94%, at least 95%, at least 96%, at least 97%, at least 98%, or at least 99% identical to the nucleic acid sequence of SEQ ID NO: 2403;
the intron comprising or consisting of a nucleic acid sequence that is at least 85%, at least 86%, at least 87%, at least 88%, at least 89%, at least 90%, at least 91%, at least 92%, at least 93%, at least 94%, at least 95%, at least 96%, at least 97%, at least 98%, or at least 99% identical to the nucleic acid sequence of SEQ ID NO: 2409;
the sequence encoding microdystrophin comprising or consisting of a nucleic acid sequence that is at least 85%, at least 86%, at least 87%, at least 88%, at least 89%, at least 90%, at least 91%, at least 92%, at least 93%, at least 94%, at least 95%, at least 96%, at least 97%, at least 98%, or at least 99% identical to the nucleic acid sequence of SEQ ID NO: 2406;
the first DRG de-targeting miRNA binding site comprising or consisting of a nucleic acid sequence that is at least 85%, at least 86%, at least 87%, at least 88%, at least 89%, at least 90%, at least 91%, at least 92%, at least 93%, at least 94%, at least 95%, at least 96%, at least 97%, at least 98%, or at least 99% identical to the nucleic acid sequence of SEQ ID NO: 2399;
the second DRG de-targeting miRNA binding site comprising or consisting of a nucleic acid sequence that is at least 85%, at least 86%, at least 87%, at least 88%, at least 89%, at least 90%, at least 91%, at least 92%, at least 93%, at least 94%, at least 95%, at least 96%, at least 97%, at least 98%, or at least 99% identical to the nucleic acid sequence of SEQ ID NO: 2399;
the PolyA signal comprising or consisting of a nucleic acid sequence that is at least 85%, at least 86%, at least 87%, at least 88%, at least 89%, at least 90%, at least 91%, at least 92%, at least 93%, at least 94%, at least 95%, at least 96%, at least 97%, at least 98%, or at least 99% identical to the nucleic acid sequence of SEQ ID NO: 2410; and
the 3′ ITR comprising or consisting of a nucleic acid sequence that is at least 85%, at least 86%, at least 87%, at least 88%, at least 89%, at least 90%, at least 91%, at least 92%, at least 93%, at least 94%, at least 95%, at least 96%, at least 97%, at least 98%, or at least 99% identical to the nucleic acid sequence of SEQ ID NO: 2411;
(l) a recombinant nucleic acid comprising:
the 5′ ITR comprising or consisting of a nucleic acid sequence that is at least 85%, at least 86%, at least 87%, at least 88%, at least 89%, at least 90%, at least 91%, at least 92%, at least 93%, at least 94%, at least 95%, at least 96%, at least 97%, at least 98%, or at least 99% identical to the nucleic acid sequence of SEQ ID NO: 2408;
the promoter comprising or consisting of a nucleic acid sequence that is at least 85%, at least 86%, at least 87%, at least 88%, at least 89%, at least 90%, at least 91%, at least 92%, at least 93%, at least 94%, at least 95%, at least 96%, at least 97%, at least 98%, or at least 99% identical to the nucleic acid sequence of SEQ ID NO: 2404;
the intron comprising or consisting of a nucleic acid sequence that is at least 85%, at least 86%, at least 87%, at least 88%, at least 89%, at least 90%, at least 91%, at least 92%, at least 93%, at least 94%, at least 95%, at least 96%, at least 97%, at least 98%, or at least 99% identical to the nucleic acid sequence of SEQ ID NO: 2409;
the sequence encoding microdystrophin comprising or consisting of a nucleic acid sequence that is at least 85%, at least 86%, at least 87%, at least 88%, at least 89%, at least 90%, at least 91%, at least 92%, at least 93%, at least 94%, at least 95%, at least 96%, at least 97%, at least 98%, or at least 99% identical to the nucleic acid sequence of SEQ ID NO: 2406;
the first DRG de-targeting miRNA binding site comprising or consisting of a nucleic acid sequence that is at least 85%, at least 86%, at least 87%, at least 88%, at least 89%, at least 90%, at least 91%, at least 92%, at least 93%, at least 94%, at least 95%, at least 96%, at least 97%, at least 98%, or at least 99% identical to the nucleic acid sequence of SEQ ID NO: 2399;
the second DRG de-targeting miRNA binding site comprising or consisting of a nucleic acid sequence that is at least 85%, at least 86%, at least 87%, at least 88%, at least 89%, at least 90%, at least 91%, at least 92%, at least 93%, at least 94%, at least 95%, at least 96%, at least 97%, at least 98%, or at least 99% identical to the nucleic acid sequence of SEQ ID NO: 2399;
the PolyA signal comprising or consisting of a nucleic acid sequence that is at least 85%, at least 86%, at least 87%, at least 88%, at least 89%, at least 90%, at least 91%, at least 92%, at least 93%, at least 94%, at least 95%, at least 96%, at least 97%, at least 98%, or at least 99% identical to the nucleic acid sequence of SEQ ID NO: 2410; and
the 3′ ITR comprising or consisting of a nucleic acid sequence that is at least 85%, at least 86%, at least 87%, at least 88%, at least 89%, at least 90%, at least 91%, at least 92%, at least 93%, at least 94%, at least 95%, at least 96%, at least 97%, at least 98%, or at least 99% identical to the nucleic acid sequence of SEQ ID NO: 2411;
(m) a recombinant nucleic acid comprising:
the 5′ ITR comprising or consisting of a nucleic acid sequence that is at least 85%, at least 86%, at least 87%, at least 88%, at least 89%, at least 90%, at least 91%, at least 92%, at least 93%, at least 94%, at least 95%, at least 96%, at least 97%, at least 98%, or at least 99% identical to the nucleic acid sequence of SEQ ID NO: 2408;
the promoter comprising or consisting of a nucleic acid sequence that is at least 85%, at least 86%, at least 87%, at least 88%, at least 89%, at least 90%, at least 91%, at least 92%, at least 93%, at least 94%, at least 95%, at least 96%, at least 97%, at least 98%, or at least 99% identical to the nucleic acid sequence of SEQ ID NO: 2402;
the intron comprising or consisting of a nucleic acid sequence that is at least 85%, at least 86%, at least 87%, at least 88%, at least 89%, at least 90%, at least 91%, at least 92%, at least 93%, at least 94%, at least 95%, at least 96%, at least 97%, at least 98%, or at least 99% identical to the nucleic acid sequence of SEQ ID NO: 2409;
the sequence encoding microdystrophin comprising or consisting of a nucleic acid sequence that is at least 85%, at least 86%, at least 87%, at least 88%, at least 89%, at least 90%, at least 91%, at least 92%, at least 93%, at least 94%, at least 95%, at least 96%, at least 97%, at least 98%, or at least 99% identical to the nucleic acid sequence of SEQ ID NO: 2406;
the first DRG de-targeting miRNA binding site comprising or consisting of a nucleic acid sequence that is at least 85%, at least 86%, at least 87%, at least 88%, at least 89%, at least 90%, at least 91%, at least 92%, at least 93%, at least 94%, at least 95%, at least 96%, at least 97%, at least 98%, or at least 99% identical to the nucleic acid sequence of SEQ ID NO: 2400;
the second DRG de-targeting miRNA binding site comprising or consisting of a nucleic acid sequence that is at least 85%, at least 86%, at least 87%, at least 88%, at least 89%, at least 90%, at least 91%, at least 92%, at least 93%, at least 94%, at least 95%, at least 96%, at least 97%, at least 98%, or at least 99% identical to the nucleic acid sequence of SEQ ID NO: 2400;
the PolyA signal comprising or consisting of a nucleic acid sequence that is at least 85%, at least 86%, at least 87%, at least 88%, at least 89%, at least 90%, at least 91%, at least 92%, at least 93%, at least 94%, at least 95%, at least 96%, at least 97%, at least 98%, or at least 99% identical to the nucleic acid sequence of SEQ ID NO: 2410; and
the 3′ ITR comprising or consisting of a nucleic acid sequence that is at least 85%, at least 86%, at least 87%, at least 88%, at least 89%, at least 90%, at least 91%, at least 92%, at least 93%, at least 94%, at least 95%, at least 96%, at least 97%, at least 98%, or at least 99% identical to the nucleic acid sequence of SEQ ID NO: 2411;
(n) a recombinant nucleic acid comprising:
the 5′ ITR comprising or consisting of a nucleic acid sequence that is at least 85%, at least 86%, at least 87%, at least 88%, at least 89%, at least 90%, at least 91%, at least 92%, at least 93%, at least 94%, at least 95%, at least 96%, at least 97%, at least 98%, or at least 99% identical to the nucleic acid sequence of SEQ ID NO: 2408;
the promoter comprising or consisting of a nucleic acid sequence that is at least least 92%, at least 93%, at least 94%, at least 95%, at least 96%, at least 97%, at least 98%, or at least 99% identical to the nucleic acid sequence of SEQ ID NO: 2403;
the intron comprising or consisting of a nucleic acid sequence that is at least 85%, at least 86%, at least 87%, at least 88%, at least 89%, at least 90%, at least 91%, at least 92%, at least 93%, at least 94%, at least 95%, at least 96%, at least 97%, at least 98%, or at least 99% identical to the nucleic acid sequence of SEQ ID NO: 2409;
the sequence encoding microdystrophin comprising or consisting of a nucleic acid sequence that is at least 85%, at least 86%, at least 87%, at least 88%, at least 89%, at least 90%, at least 91%, at least 92%, at least 93%, at least 94%, at least 95%, at least 96%, at least 97%, at least 98%, or at least 99% identical to the nucleic acid sequence of SEQ ID NO: 2406;
the first DRG de-targeting miRNA binding site comprising or consisting of a nucleic acid sequence that is at least 85%, at least 86%, at least 87%, at least 88%, at least 89%, at least 90%, at least 91%, at least 92%, at least 93%, at least 94%, at least 95%, at least 96%, at least 97%, at least 98%, or at least 99% identical to the nucleic acid sequence of SEQ ID NO: 2400;
the second DRG de-targeting miRNA binding site comprising or consisting of a nucleic acid sequence that is at least 85%, at least 86%, at least 87%, at least 88%, at least 89%, at least 90%, at least 91%, at least 92%, at least 93%, at least 94%, at least 95%, at least 96%, at least 97%, at least 98%, or at least 99% identical to the nucleic acid sequence of SEQ ID NO: 2400;
the PolyA signal comprising or consisting of a nucleic acid sequence that is at least 85%, at least 86%, at least 87%, at least 88%, at least 89%, at least 90%, at least 91%, at least 92%, at least 93%, at least 94%, at least 95%, at least 96%, at least 97%, at least 98%, or at least 99% identical to the nucleic acid sequence of SEQ ID NO: 2410; and
the 3′ ITR comprising or consisting of a nucleic acid sequence that is at least 85%, 92%, at least 93%, at least 94%, at least 95%, at least 96%, at least 97%, at least 98%, or at least 99% identical to the nucleic acid sequence of SEQ ID NO: 2411;
(o) a recombinant nucleic acid comprising:
the 5′ ITR comprising or consisting of a nucleic acid sequence that is at least 85%, at least 86%, at least 87%, at least 88%, at least 89%, at least 90%, at least 91%, at least 92%, at least 93%, at least 94%, at least 95%, at least 96%, at least 97%, at least 98%, or at least 99% identical to the nucleic acid sequence of SEQ ID NO: 2408;
the promoter comprising or consisting of a nucleic acid sequence that is at least 85%, at least 86%, at least 87%, at least 88%, at least 89%, at least 90%, at least 91%, at least 92%, at least 93%, at least 94%, at least 95%, at least 96%, at least 97%, at least 98%, or at least 99% identical to the nucleic acid sequence of SEQ ID NO: 2404;
the intron comprising or consisting of a nucleic acid sequence that is at least 85%, at least 86%, at least 87%, at least 88%, at least 89%, at least 90%, at least 91%, at least 92%, at least 93%, at least 94%, at least 95%, at least 96%, at least 97%, at least 98%, or at least 99% identical to the nucleic acid sequence of SEQ ID NO: 2409;
the sequence encoding microdystrophin comprising or consisting of a nucleic acid sequence that is at least 85%, at least 86%, at least 87%, at least 88%, at least 89%, at least 90%, at least 91%, at least 92%, at least 93%, at least 94%, at least 95%, at least 96%, at least 97%, at least 98%, or at least 99% identical to the nucleic acid sequence of SEQ ID NO: 2406;
the first DRG de-targeting miRNA binding site comprising or consisting of a nucleic acid sequence that is at least 85%, at least 86%, at least 87%, at least 88%, at least 89%, at least 90%, at least 91%, at least 92%, at least 93%, at least 94%, at least 95%, at least 96%, at least 97%, at least 98%, or at least 99% identical to the nucleic acid sequence of SEQ ID NO: 2400;
the second DRG de-targeting miRNA binding site comprising or consisting of a nucleic acid sequence that is at least 85%, at least 86%, at least 87%, at least 88%, at least 89%, at least 90%, at least 91%, at least 92%, at least 93%, at least 94%, at least 95%, at least 96%, at least 97%, at least 98%, or at least 99% identical to the nucleic acid sequence of SEQ ID NO: 2400;
the PolyA signal comprising or consisting of a nucleic acid sequence that is at least 85%, at least 86%, at least 87%, at least 88%, at least 89%, at least 90%, at least 91%, at least 92%, at least 93%, at least 94%, at least 95%, at least 96%, at least 97%, at least 98%, or at least 99% identical to the nucleic acid sequence of SEQ ID NO: 2410; and
the 3′ ITR comprising or consisting of a nucleic acid sequence that is at least 85%, at least 86%, at least 87%, at least 88%, at least 89%, at least 90%, at least 91%, at least 92%, at least 93%, at least 94%, at least 95%, at least 96%, at least 97%, at least 98%, or at least 99% identical to the nucleic acid sequence of SEQ ID NO: 2411;
(p) a recombinant nucleic acid comprising:
the 5′ ITR comprising or consisting of a nucleic acid sequence that is at least 85%, at least 86%, at least 87%, at least 88%, at least 89%, at least 90%, at least 91%, at least 92%, at least 93%, at least 94%, at least 95%, at least 96%, at least 97%, at least 98%, or at least 99% identical to the nucleic acid sequence of SEQ ID NO: 2408;
the promoter comprising or consisting of a nucleic acid sequence that is at least 85%, at least 86%, at least 87%, at least 88%, at least 89%, at least 90%, at least 91%, at least 92%, at least 93%, at least 94%, at least 95%, at least 96%, at least 97%, at least 98%, or at least 99% identical to the nucleic acid sequence of SEQ ID NO: 2402;
the intron comprising or consisting of a nucleic acid sequence that is at least 85%, at least 86%, at least 87%, at least 88%, at least 89%, at least 90%, at least 91%, at least 92%, at least 93%, at least 94%, at least 95%, at least 96%, at least 97%, at least 98%, or at least 99% identical to the nucleic acid sequence of SEQ ID NO: 2409;
the sequence encoding microdystrophin comprising or consisting of a nucleic acid sequence that is at least 85%, at least 86%, at least 87%, at least 88%, at least 89%, at least 90%, at least 91%, at least 92%, at least 93%, at least 94%, at least 95%, at least 96%, at least 97%, at least 98%, or at least 99% identical to the nucleic acid sequence of SEQ ID NO: 2406;
the first DRG de-targeting miRNA binding site comprising or consisting of a nucleic acid sequence that is at least 85%, at least 86%, at least 87%, at least 88%, at least 89%, at least 90%, at least 91%, at least 92%, at least 93%, at least 94%, at least 95%, at least 96%, at least 97%, at least 98%, or at least 99% identical to the nucleic acid sequence of SEQ ID NO: 2401;
the second DRG de-targeting miRNA binding site comprising or consisting of a nucleic acid sequence that is at least 85%, at least 86%, at least 87%, at least 88%, at least 89%, at least 90%, at least 91%, at least 92%, at least 93%, at least 94%, at least 95%, at least 96%, at least 97%, at least 98%, or at least 99% identical to the nucleic acid sequence of SEQ ID NO: 2401;
the PolyA signal comprising or consisting of a nucleic acid sequence that is at least 85%, at least 86%, at least 87%, at least 88%, at least 89%, at least 90%, at least 91%, at least 92%, at least 93%, at least 94%, at least 95%, at least 96%, at least 97%, at least 98%, or at least 99% identical to the nucleic acid sequence of SEQ ID NO: 2410; and
the 3′ ITR comprising or consisting of a nucleic acid sequence that is at least 85%, at least 86%, at least 87%, at least 88%, at least 89%, at least 90%, at least 91%, at least 92%, at least 93%, at least 94%, at least 95%, at least 96%, at least 97%, at least 98%, or at least 99% identical to the nucleic acid sequence of SEQ ID NO: 2411;
(q) a recombinant nucleic acid comprising:
the 5′ ITR comprising or consisting of a nucleic acid sequence that is at least 85%, at least 86%, at least 87%, at least 88%, at least 89%, at least 90%, at least 91%, at least 92%, at least 93%, at least 94%, at least 95%, at least 96%, at least 97%, at least 98%, or at least 99% identical to the nucleic acid sequence of SEQ ID NO: 2408;
the promoter comprising or consisting of a nucleic acid sequence that is at least least 92%, at least 93%, at least 94%, at least 95%, at least 96%, at least 97%, at least 98%, or at least 99% identical to the nucleic acid sequence of SEQ ID NO: 2403;
the intron comprising or consisting of a nucleic acid sequence that is at least 85%, at least 86%, at least 87%, at least 88%, at least 89%, at least 90%, at least 91%, at least 92%, at least 93%, at least 94%, at least 95%, at least 96%, at least 97%, at least 98%, or at least 99% identical to the nucleic acid sequence of SEQ ID NO: 2409;
the sequence encoding microdystrophin comprising or consisting of a nucleic acid sequence that is at least 85%, at least 86%, at least 87%, at least 88%, at least 89%, at least 90%, at least 91%, at least 92%, at least 93%, at least 94%, at least 95%, at least 96%, at least 97%, at least 98%, or at least 99% identical to the nucleic acid sequence of SEQ ID NO: 2406;
the first DRG de-targeting miRNA binding site comprising or consisting of a nucleic acid sequence that is at least 85%, at least 86%, at least 87%, at least 88%, at least 89%, at least 90%, at least 91%, at least 92%, at least 93%, at least 94%, at least 95%, at least 96%, at least 97%, at least 98%, or at least 99% identical to the nucleic acid sequence of SEQ ID NO: 2401;
the second DRG de-targeting miRNA binding site comprising or consisting of a nucleic acid sequence that is at least 85%, at least 86%, at least 87%, at least 88%, at least 89%, at least 90%, at least 91%, at least 92%, at least 93%, at least 94%, at least 95%, at least 96%, at least 97%, at least 98%, or at least 99% identical to the nucleic acid sequence of SEQ ID NO: 2401;
the PolyA signal comprising or consisting of a nucleic acid sequence that is at least 85%, at least 86%, at least 87%, at least 88%, at least 89%, at least 90%, at least 91%, at least 92%, at least 93%, at least 94%, at least 95%, at least 96%, at least 97%, at least 98%, or at least 99% identical to the nucleic acid sequence of SEQ ID NO: 2410; and
the 3′ ITR comprising or consisting of a nucleic acid sequence that is at least 85%, 92%, at least 93%, at least 94%, at least 95%, at least 96%, at least 97%, at least 98%, or at least 99% identical to the nucleic acid sequence of SEQ ID NO: 2411;
(r) a recombinant nucleic acid comprising:
the 5′ ITR comprising or consisting of a nucleic acid sequence that is at least 85%, at least 86%, at least 87%, at least 88%, at least 89%, at least 90%, at least 91%, at least 92%, at least 93%, at least 94%, at least 95%, at least 96%, at least 97%, at least 98%, or at least 99% identical to the nucleic acid sequence of SEQ ID NO: 2408;
the promoter comprising or consisting of a nucleic acid sequence that is at least 85%, at least 86%, at least 87%, at least 88%, at least 89%, at least 90%, at least 91%, at least 92%, at least 93%, at least 94%, at least 95%, at least 96%, at least 97%, at least 98%, or at least 99% identical to the nucleic acid sequence of SEQ ID NO: 2404;
the intron comprising or consisting of a nucleic acid sequence that is at least 85%, at least 86%, at least 87%, at least 88%, at least 89%, at least 90%, at least 91%, at least 92%, at least 93%, at least 94%, at least 95%, at least 96%, at least 97%, at least 98%, or at least 99% identical to the nucleic acid sequence of SEQ ID NO: 2409;
the sequence encoding microdystrophin comprising or consisting of a nucleic acid sequence that is at least 85%, at least 86%, at least 87%, at least 88%, at least 89%, at least 90%, at least 91%, at least 92%, at least 93%, at least 94%, at least 95%, at least 96%, at least 97%, at least 98%, or at least 99% identical to the nucleic acid sequence of SEQ ID NO: 2406;
the first DRG de-targeting miRNA binding site comprising or consisting of a nucleic acid sequence that is at least 85%, at least 86%, at least 87%, at least 88%, at least 89%, at least 90%, at least 91%, at least 92%, at least 93%, at least 94%, at least 95%, at least 96%, at least 97%, at least 98%, or at least 99% identical to the nucleic acid sequence of SEQ ID NO: 2401;
the second DRG de-targeting miRNA binding site comprising or consisting of a nucleic acid sequence that is at least 85%, at least 86%, at least 87%, at least 88%, at least 89%, at least 90%, at least 91%, at least 92%, at least 93%, at least 94%, at least 95%, at least 96%, at least 97%, at least 98%, or at least 99% identical to the nucleic acid sequence of SEQ ID NO: 2401;
the PolyA signal comprising or consisting of a nucleic acid sequence that is at least 85%, at least 86%, at least 87%, at least 88%, at least 89%, at least 90%, at least 91%, at least 92%, at least 93%, at least 94%, at least 95%, at least 96%, at least 97%, at least 98%, or at least 99% identical to the nucleic acid sequence of SEQ ID NO: 2410; and
the 3′ ITR comprising or consisting of a nucleic acid sequence that is at least 85%, at least 86%, at least 87%, at least 88%, at least 89%, at least 90%, at least 91%, at least 92%, at least 93%, at least 94%, at least 95%, at least 96%, at least 97%, at least 98%, or at least 99% identical to the nucleic acid sequence of SEQ ID NO: 2411;
(s) a recombinant nucleic acid comprising:
the 5′ ITR comprising or consisting of a nucleic acid sequence that is at least 85%, at least 86%, at least 87%, at least 88%, at least 89%, at least 90%, at least 91%, at least 92%, at least 93%, at least 94%, at least 95%, at least 96%, at least 97%, at least 98%, or at least 99% identical to the nucleic acid sequence of SEQ ID NO: 2408;
the promoter comprising or consisting of a nucleic acid sequence that is at least 85%, at least 86%, at least 87%, at least 88%, at least 89%, at least 90%, at least 91%, at least 92%, at least 93%, at least 94%, at least 95%, at least 96%, at least 97%, at least 98%, or at least 99% identical to the nucleic acid sequence of SEQ ID NO: 2402;
the intron comprising or consisting of a nucleic acid sequence that is at least 85%, at least 86%, at least 87%, at least 88%, at least 89%, at least 90%, at least 91%, at least 92%, at least 93%, at least 94%, at least 95%, at least 96%, at least 97%, at least 98%, or at least 99% identical to the nucleic acid sequence of SEQ ID NO: 2409;
the sequence encoding microdystrophin comprising or consisting of a nucleic acid sequence that is at least 85%, at least 86%, at least 87%, at least 88%, at least 89%, at least 90%, at least 91%, at least 92%, at least 93%, at least 94%, at least 95%, at least 96%, at least 97%, at least 98%, or at least 99% identical to the nucleic acid sequence of SEQ ID NO: 2407;
the first DRG de-targeting miRNA binding site comprising or consisting of a nucleic acid sequence that is at least 85%, at least 86%, at least 87%, at least 88%, at least 89%, at least 90%, at least 91%, at least 92%, at least 93%, at least 94%, at least 95%, at least 96%, at least 97%, at least 98%, or at least 99% identical to the nucleic acid sequence of SEQ ID NO: 2399;
the second DRG de-targeting miRNA binding site comprising or consisting of a nucleic acid sequence that is at least 85%, at least 86%, at least 87%, at least 88%, at least 89%, at least 90%, at least 91%, at least 92%, at least 93%, at least 94%, at least 95%, at least 96%, at least 97%, at least 98%, or at least 99% identical to the nucleic acid sequence of SEQ ID NO: 2399;
the PolyA signal comprising or consisting of a nucleic acid sequence that is at least 85%, at least 86%, at least 87%, at least 88%, at least 89%, at least 90%, at least 91%, at least 92%, at least 93%, at least 94%, at least 95%, at least 96%, at least 97%, at least 98%, or at least 99% identical to the nucleic acid sequence of SEQ ID NO: 2410; and
the 3′ ITR comprising or consisting of a nucleic acid sequence that is at least 85%, at least 86%, at least 87%, at least 88%, at least 89%, at least 90%, at least 91%, at least 92%, at least 93%, at least 94%, at least 95%, at least 96%, at least 97%, at least 98%, or at least 99% identical to the nucleic acid sequence of SEQ ID NO: 2411;
(t) a recombinant nucleic acid comprising:
the 5′ ITR comprising or consisting of a nucleic acid sequence that is at least 85%, at least 86%, at least 87%, at least 88%, at least 89%, at least 90%, at least 91%, at least 92%, at least 93%, at least 94%, at least 95%, at least 96%, at least 97%, at least 98%, or at least 99% identical to the nucleic acid sequence of SEQ ID NO: 2408;
the promoter comprising or consisting of a nucleic acid sequence that is at least 85%, at least 86%, at least 87%, at least 88%, at least 89%, at least 90%, at least 91%, at least 92%, at least 93%, at least 94%, at least 95%, at least 96%, at least 97%, at least 98%, or at least 99% identical to the nucleic acid sequence of SEQ ID NO: 2403;
the intron comprising or consisting of a nucleic acid sequence that is at least 85%, at least 86%, at least 87%, at least 88%, at least 89%, at least 90%, at least 91%, at least 92%, at least 93%, at least 94%, at least 95%, at least 96%, at least 97%, at least 98%, or at least 99% identical to the nucleic acid sequence of SEQ ID NO: 2409;
the sequence encoding microdystrophin comprising or consisting of a nucleic acid sequence that is at least 85%, at least 86%, at least 87%, at least 88%, at least 89%, at least 90%, at least 91%, at least 92%, at least 93%, at least 94%, at least 95%, at least 96%, at least 97%, at least 98%, or at least 99% identical to the nucleic acid sequence of SEQ ID NO: 2407;
the first DRG de-targeting miRNA binding site comprising or consisting of a nucleic acid sequence that is at least 85%, at least 86%, at least 87%, at least 88%, at least 89%, at least 90%, at least 91%, at least 92%, at least 93%, at least 94%, at least 95%, at least 96%, at least 97%, at least 98%, or at least 99% identical to the nucleic acid sequence of SEQ ID NO: 2399;
the second DRG de-targeting miRNA binding site comprising or consisting of a nucleic acid sequence that is at least 85%, at least 86%, at least 87%, at least 88%, at least 89%, at least 90%, at least 91%, at least 92%, at least 93%, at least 94%, at least 95%, at least 96%, at least 97%, at least 98%, or at least 99% identical to the nucleic acid sequence of SEQ ID NO: 2399;
the PolyA signal comprising or consisting of a nucleic acid sequence that is at least 85%, at least 86%, at least 87%, at least 88%, at least 89%, at least 90%, at least 91%, at least 92%, at least 93%, at least 94%, at least 95%, at least 96%, at least 97%, at least 98%, or at least 99% identical to the nucleic acid sequence of SEQ ID NO: 2410; and
the 3′ ITR comprising or consisting of a nucleic acid sequence that is at least 85%, at least 86%, at least 87%, at least 88%, at least 89%, at least 90%, at least 91%, at least 92%, at least 93%, at least 94%, at least 95%, at least 96%, at least 97%, at least 98%, or at least 99% identical to the nucleic acid sequence of SEQ ID NO: 2411;
(u) a recombinant nucleic acid comprising:
the 5′ ITR comprising or consisting of a nucleic acid sequence that is at least 85%, 92%, at least 93%, at least 94%, at least 95%, at least 96%, at least 97%, at least 98%, or at least 99% identical to the nucleic acid sequence of SEQ ID NO: 2408;
the promoter comprising or consisting of a nucleic acid sequence that is at least 85%, at least 86%, at least 87%, at least 88%, at least 89%, at least 90%, at least 91%, at least 92%, at least 93%, at least 94%, at least 95%, at least 96%, at least 97%, at least 98%, or at least 99% identical to the nucleic acid sequence of SEQ ID NO: 2404;
the intron comprising or consisting of a nucleic acid sequence that is at least 85%, at least 86%, at least 87%, at least 88%, at least 89%, at least 90%, at least 91%, at least 92%, at least 93%, at least 94%, at least 95%, at least 96%, at least 97%, at least 98%, or at least 99% identical to the nucleic acid sequence of SEQ ID NO: 2409;
the sequence encoding microdystrophin comprising or consisting of a nucleic acid sequence that is at least 85%, at least 86%, at least 87%, at least 88%, at least 89%, at least 90%, at least 91%, at least 92%, at least 93%, at least 94%, at least 95%, at least 96%, at least 97%, at least 98%, or at least 99% identical to the nucleic acid sequence of SEQ ID NO: 2407;
the first DRG de-targeting miRNA binding site comprising or consisting of a nucleic acid sequence that is at least 85%, at least 86%, at least 87%, at least 88%, at least 89%, at least 90%, at least 91%, at least 92%, at least 93%, at least 94%, at least 95%, at least 96%, at least 97%, at least 98%, or at least 99% identical to the nucleic acid sequence of SEQ ID NO: 2399;
the second DRG de-targeting miRNA binding site comprising or consisting of a nucleic acid sequence that is at least 85%, at least 86%, at least 87%, at least 88%, at least 89%, at least 90%, at least 91%, at least 92%, at least 93%, at least 94%, at least 95%, at least 96%, at least 97%, at least 98%, or at least 99% identical to the nucleic acid sequence of SEQ ID NO: 2399;
the PolyA signal comprising or consisting of a nucleic acid sequence that is at least 85%, at least 86%, at least 87%, at least 88%, at least 89%, at least 90%, at least 91%, at least 92%, at least 93%, at least 94%, at least 95%, at least 96%, at least 97%, at least 98%, or at least 99% identical to the nucleic acid sequence of SEQ ID NO: 2410; and
the 3′ ITR comprising or consisting of a nucleic acid sequence that is at least 85%, at least 86%, at least 87%, at least 88%, at least 89%, at least 90%, at least 91%, at least 92%, at least 93%, at least 94%, at least 95%, at least 96%, at least 97%, at least 98%, or at least 99% identical to the nucleic acid sequence of SEQ ID NO: 2411;
(v) a recombinant nucleic acid comprising:
the 5′ ITR comprising or consisting of a nucleic acid sequence that is at least 85%, at least 86%, at least 87%, at least 88%, at least 89%, at least 90%, at least 91%, at least 92%, at least 93%, at least 94%, at least 95%, at least 96%, at least 97%, at least 98%, or at least 99% identical to the nucleic acid sequence of SEQ ID NO: 2408;
the promoter comprising or consisting of a nucleic acid sequence that is at least 85%, at least 86%, at least 87%, at least 88%, at least 89%, at least 90%, at least 91%, at least 92%, at least 93%, at least 94%, at least 95%, at least 96%, at least 97%, at least 98%, or at least 99% identical to the nucleic acid sequence of SEQ ID NO: 2402;
the intron comprising or consisting of a nucleic acid sequence that is at least 85%, at least 86%, at least 87%, at least 88%, at least 89%, at least 90%, at least 91%, at least 92%, at least 93%, at least 94%, at least 95%, at least 96%, at least 97%, at least 98%, or at least 99% identical to the nucleic acid sequence of SEQ ID NO: 2409;
the sequence encoding microdystrophin comprising or consisting of a nucleic acid sequence that is at least 85%, at least 86%, at least 87%, at least 88%, at least 89%, at least 90%, at least 91%, at least 92%, at least 93%, at least 94%, at least 95%, at least 96%, at least 97%, at least 98%, or at least 99% identical to the nucleic acid sequence of SEQ ID NO: 2407;
the first DRG de-targeting miRNA binding site comprising or consisting of a nucleic acid sequence that is at least 85%, at least 86%, at least 87%, at least 88%, at least 89%, at least 90%, at least 91%, at least 92%, at least 93%, at least 94%, at least 95%, at least 96%, at least 97%, at least 98%, or at least 99% identical to the nucleic acid sequence of SEQ ID NO: 2400;
the second DRG de-targeting miRNA binding site comprising or consisting of a nucleic acid sequence that is at least 85%, at least 86%, at least 87%, at least 88%, at least 89%, at least 90%, at least 91%, at least 92%, at least 93%, at least 94%, at least 95%, at least 96%, at least 97%, at least 98%, or at least 99% identical to the nucleic acid sequence of SEQ ID NO: 2400;
the PolyA signal comprising or consisting of a nucleic acid sequence that is at least 85%, at least 86%, at least 87%, at least 88%, at least 89%, at least 90%, at least 91%, at least 92%, at least 93%, at least 94%, at least 95%, at least 96%, at least 97%, at least 98%, or at least 99% identical to the nucleic acid sequence of SEQ ID NO: 2410; and
the 3′ ITR comprising or consisting of a nucleic acid sequence that is at least 85%, at least 86%, at least 87%, at least 88%, at least 89%, at least 90%, at least 91%, at least 92%, at least 93%, at least 94%, at least 95%, at least 96%, at least 97%, at least 98%, or at least 99% identical to the nucleic acid sequence of SEQ ID NO: 2411;
(w) a recombinant nucleic acid comprising:
the 5′ ITR comprising or consisting of a nucleic acid sequence that is at least 85%, at least 86%, at least 87%, at least 88%, at least 89%, at least 90%, at least 91%, at least 92%, at least 93%, at least 94%, at least 95%, at least 96%, at least 97%, at least 98%, or at least 99% identical to the nucleic acid sequence of SEQ ID NO: 2408;
the promoter comprising or consisting of a nucleic acid sequence that is at least 85%, at least 86%, at least 87%, at least 88%, at least 89%, at least 90%, at least 91%, at least 92%, at least 93%, at least 94%, at least 95%, at least 96%, at least 97%, at least 98%, or at least 99% identical to the nucleic acid sequence of SEQ ID NO: 2403;
the intron comprising or consisting of a nucleic acid sequence that is at least 85%, at least 86%, at least 87%, at least 88%, at least 89%, at least 90%, at least 91%, at least 92%, at least 93%, at least 94%, at least 95%, at least 96%, at least 97%, at least 98%, or at least 99% identical to the nucleic acid sequence of SEQ ID NO: 2409;
the sequence encoding microdystrophin comprising or consisting of a nucleic acid sequence that is at least 85%, at least 86%, at least 87%, at least 88%, at least 89%, at least 90%, at least 91%, at least 92%, at least 93%, at least 94%, at least 95%, at least 96%, at least 97%, at least 98%, or at least 99% identical to the nucleic acid sequence of SEQ ID NO: 2407;
the first DRG de-targeting miRNA binding site comprising or consisting of a nucleic acid sequence that is at least 85%, at least 86%, at least 87%, at least 88%, at least 89%, at least 90%, at least 91%, at least 92%, at least 93%, at least 94%, at least 95%, at least 96%, at least 97%, at least 98%, or at least 99% identical to the nucleic acid sequence of SEQ ID NO: 2400;
the second DRG de-targeting miRNA binding site comprising or consisting of a nucleic acid sequence that is at least 85%, at least 86%, at least 87%, at least 88%, at least 89%, at least 90%, at least 91%, at least 92%, at least 93%, at least 94%, at least 95%, at least 96%, at least 97%, at least 98%, or at least 99% identical to the nucleic acid sequence of SEQ ID NO: 2400;
the PolyA signal comprising or consisting of a nucleic acid sequence that is at least 85%, at least 86%, at least 87%, at least 88%, at least 89%, at least 90%, at least 91%, at least 92%, at least 93%, at least 94%, at least 95%, at least 96%, at least 97%, at least 98%, or at least 99% identical to the nucleic acid sequence of SEQ ID NO: 2410; and
the 3′ ITR comprising or consisting of a nucleic acid sequence that is at least 85%, at least 86%, at least 87%, at least 88%, at least 89%, at least 90%, at least 91%, at least 92%, at least 93%, at least 94%, at least 95%, at least 96%, at least 97%, at least 98%, or at least 99% identical to the nucleic acid sequence of SEQ ID NO: 2411;
(x) a recombinant nucleic acid comprising:
the 5′ ITR comprising or consisting of a nucleic acid sequence that is at least 85%, at least 86%, at least 87%, at least 88%, at least 89%, at least 90%, at least 91%, at least 92%, at least 93%, at least 94%, at least 95%, at least 96%, at least 97%, at least 98%, or at least 99% identical to the nucleic acid sequence of SEQ ID NO: 2408;
the promoter comprising or consisting of a nucleic acid sequence that is at least least 92%, at least 93%, at least 94%, at least 95%, at least 96%, at least 97%, at least 98%, or at least 99% identical to the nucleic acid sequence of SEQ ID NO: 2404;
the intron comprising or consisting of a nucleic acid sequence that is at least 85%, at least 86%, at least 87%, at least 88%, at least 89%, at least 90%, at least 91%, at least 92%, at least 93%, at least 94%, at least 95%, at least 96%, at least 97%, at least 98%, or at least 99% identical to the nucleic acid sequence of SEQ ID NO: 2409;
the sequence encoding microdystrophin comprising or consisting of a nucleic acid sequence that is at least 85%, at least 86%, at least 87%, at least 88%, at least 89%, at least 90%, at least 91%, at least 92%, at least 93%, at least 94%, at least 95%, at least 96%, at least 97%, at least 98%, or at least 99% identical to the nucleic acid sequence of SEQ ID NO: 2407;
the first DRG de-targeting miRNA binding site comprising or consisting of a nucleic acid sequence that is at least 85%, at least 86%, at least 87%, at least 88%, at least 89%, at least 90%, at least 91%, at least 92%, at least 93%, at least 94%, at least 95%, at least 96%, at least 97%, at least 98%, or at least 99% identical to the nucleic acid sequence of SEQ ID NO: 2400;
the second DRG de-targeting miRNA binding site comprising or consisting of a nucleic acid sequence that is at least 85%, at least 86%, at least 87%, at least 88%, at least 89%, at least 90%, at least 91%, at least 92%, at least 93%, at least 94%, at least 95%, at least 96%, at least 97%, at least 98%, or at least 99% identical to the nucleic acid sequence of SEQ ID NO: 2400;
the PolyA signal comprising or consisting of a nucleic acid sequence that is at least 85%, at least 86%, at least 87%, at least 88%, at least 89%, at least 90%, at least 91%, at least 92%, at least 93%, at least 94%, at least 95%, at least 96%, at least 97%, at least 98%, or at least 99% identical to the nucleic acid sequence of SEQ ID NO: 2410; and
the 3′ ITR comprising or consisting of a nucleic acid sequence that is at least 85%, at least 86%, at least 87%, at least 88%, at least 89%, at least 90%, at least 91%, at least 92%, at least 93%, at least 94%, at least 95%, at least 96%, at least 97%, at least 98%, or at least 99% identical to the nucleic acid sequence of SEQ ID NO: 2411;
(y) a recombinant nucleic acid comprising:
the 5′ ITR comprising or consisting of a nucleic acid sequence that is at least 85%, at least 86%, at least 87%, at least 88%, at least 89%, at least 90%, at least 91%, at least 92%, at least 93%, at least 94%, at least 95%, at least 96%, at least 97%, at least 98%, or at least 99% identical to the nucleic acid sequence of SEQ ID NO: 2408;
the promoter comprising or consisting of a nucleic acid sequence that is at least 85%, at least 86%, at least 87%, at least 88%, at least 89%, at least 90%, at least 91%, at least 92%, at least 93%, at least 94%, at least 95%, at least 96%, at least 97%, at least 98%, or at least 99% identical to the nucleic acid sequence of SEQ ID NO: 2402;
the intron comprising or consisting of a nucleic acid sequence that is at least 85%, at least 86%, at least 87%, at least 88%, at least 89%, at least 90%, at least 91%, at least 92%, at least 93%, at least 94%, at least 95%, at least 96%, at least 97%, at least 98%, or at least 99% identical to the nucleic acid sequence of SEQ ID NO: 2409;
the sequence encoding microdystrophin comprising or consisting of a nucleic acid sequence that is at least 85%, at least 86%, at least 87%, at least 88%, at least 89%, at least 90%, at least 91%, at least 92%, at least 93%, at least 94%, at least 95%, at least 96%, at least 97%, at least 98%, or at least 99% identical to the nucleic acid sequence of SEQ ID NO: 2407;
the first DRG de-targeting miRNA binding site comprising or consisting of a nucleic acid sequence that is at least 85%, at least 86%, at least 87%, at least 88%, at least 89%, at least 90%, at least 91%, at least 92%, at least 93%, at least 94%, at least 95%, at least 96%, at least 97%, at least 98%, or at least 99% identical to the nucleic acid sequence of SEQ ID NO: 2401;
the second DRG de-targeting miRNA binding site comprising or consisting of a nucleic acid sequence that is at least 85%, at least 86%, at least 87%, at least 88%, at least 89%, at least 90%, at least 91%, at least 92%, at least 93%, at least 94%, at least 95%, at least 96%, at least 97%, at least 98%, or at least 99% identical to the nucleic acid sequence of SEQ ID NO: 2401;
the PolyA signal comprising or consisting of a nucleic acid sequence that is at least 85%, at least 86%, at least 87%, at least 88%, at least 89%, at least 90%, at least 91%, at least 92%, at least 93%, at least 94%, at least 95%, at least 96%, at least 97%, at least 98%, or at least 99% identical to the nucleic acid sequence of SEQ ID NO: 2410; and
the 3′ ITR comprising or consisting of a nucleic acid sequence that is at least 85%, at least 86%, at least 87%, at least 88%, at least 89%, at least 90%, at least 91%, at least 92%, at least 93%, at least 94%, at least 95%, at least 96%, at least 97%, at least 98%, or at least 99% identical to the nucleic acid sequence of SEQ ID NO: 2411;
(z) a recombinant nucleic acid comprising:
the 5′ ITR comprising or consisting of a nucleic acid sequence that is at least 85%, at least 86%, at least 87%, at least 88%, at least 89%, at least 90%, at least 91%, at least 92%, at least 93%, at least 94%, at least 95%, at least 96%, at least 97%, at least 98%, or at least 99% identical to the nucleic acid sequence of SEQ ID NO: 2408;
the promoter comprising or consisting of a nucleic acid sequence that is at least 85%, at least 86%, at least 87%, at least 88%, at least 89%, at least 90%, at least 91%, at least 92%, at least 93%, at least 94%, at least 95%, at least 96%, at least 97%, at least 98%, or at least 99% identical to the nucleic acid sequence of SEQ ID NO: 2403;
the intron comprising or consisting of a nucleic acid sequence that is at least 85%, at least 86%, at least 87%, at least 88%, at least 89%, at least 90%, at least 91%, at least 92%, at least 93%, at least 94%, at least 95%, at least 96%, at least 97%, at least 98%, or at least 99% identical to the nucleic acid sequence of SEQ ID NO: 2409;
the sequence encoding microdystrophin comprising or consisting of a nucleic acid sequence that is at least 85%, at least 86%, at least 87%, at least 88%, at least 89%, at least 90%, at least 91%, at least 92%, at least 93%, at least 94%, at least 95%, at least 96%, at least 97%, at least 98%, or at least 99% identical to the nucleic acid sequence of SEQ ID NO: 2407;
the first DRG de-targeting miRNA binding site comprising or consisting of a nucleic acid sequence that is at least 85%, at least 86%, at least 87%, at least 88%, at least 89%, at least 90%, at least 91%, at least 92%, at least 93%, at least 94%, at least 95%, at least 96%, at least 97%, at least 98%, or at least 99% identical to the nucleic acid sequence of SEQ ID NO: 2401;
the second DRG de-targeting miRNA binding site comprising or consisting of a nucleic acid sequence that is at least 85%, at least 86%, at least 87%, at least 88%, at least 89%, at least 90%, at least 91%, at least 92%, at least 93%, at least 94%, at least 95%, at least 96%, at least 97%, at least 98%, or at least 99% identical to the nucleic acid sequence of SEQ ID NO: 2401;
the PolyA signal comprising or consisting of a nucleic acid sequence that is at least 85%, at least 86%, at least 87%, at least 88%, at least 89%, at least 90%, at least 91%, at least 92%, at least 93%, at least 94%, at least 95%, at least 96%, at least 97%, at least 98%, or at least 99% identical to the nucleic acid sequence of SEQ ID NO: 2410; and
the 3′ ITR comprising or consisting of a nucleic acid sequence that is at least 85%, at least 86%, at least 87%, at least 88%, at least 89%, at least 90%, at least 91%, at least 92%, at least 93%, at least 94%, at least 95%, at least 96%, at least 97%, at least 98%, or at least 99% identical to the nucleic acid sequence of SEQ ID NO: 2411; and
(aa) a recombinant nucleic acid comprising:
the 5′ ITR comprising or consisting of a nucleic acid sequence that is at least 85%, at least 86%, at least 87%, at least 88%, at least 89%, at least 90%, at least 91%, at least 92%, at least 93%, at least 94%, at least 95%, at least 96%, at least 97%, at least 98%, or at least 99% identical to the nucleic acid sequence of SEQ ID NO: 2408;
the promoter comprising or consisting of a nucleic acid sequence that is at least least 92%, at least 93%, at least 94%, at least 95%, at least 96%, at least 97%, at least 98%, or at least 99% identical to the nucleic acid sequence of SEQ ID NO: 2404;
the intron comprising or consisting of a nucleic acid sequence that is at least 85%, at least 86%, at least 87%, at least 88%, at least 89%, at least 90%, at least 91%, at least 92%, at least 93%, at least 94%, at least 95%, at least 96%, at least 97%, at least 98%, or at least 99% identical to the nucleic acid sequence of SEQ ID NO: 2409;
the sequence encoding microdystrophin comprising or consisting of a nucleic acid sequence that is at least 85%, at least 86%, at least 87%, at least 88%, at least 89%, at least 90%, at least 91%, at least 92%, at least 93%, at least 94%, at least 95%, at least 96%, at least 97%, at least 98%, or at least 99% identical to the nucleic acid sequence of SEQ ID NO: 2407;
the first DRG de-targeting miRNA binding site comprising or consisting of a nucleic acid sequence that is at least 85%, at least 86%, at least 87%, at least 88%, at least 89%, at least 90%, at least 91%, at least 92%, at least 93%, at least 94%, at least 95%, at least 96%, at least 97%, at least 98%, or at least 99% identical to the nucleic acid sequence of SEQ ID NO: 2401;
the second DRG de-targeting miRNA binding site comprising or consisting of a nucleic acid sequence that is at least 85%, at least 86%, at least 87%, at least 88%, at least 89%, at least 90%, at least 91%, at least 92%, at least 93%, at least 94%, at least 95%, at least 96%, at least 97%, at least 98%, or at least 99% identical to the nucleic acid sequence of SEQ ID NO: 2401;
the PolyA signal comprising or consisting of a nucleic acid sequence that is at least 85%, at least 86%, at least 87%, at least 88%, at least 89%, at least 90%, at least 91%, at least 92%, at least 93%, at least 94%, at least 95%, at least 96%, at least 97%, at least 98%, or at least 99% identical to the nucleic acid sequence of SEQ ID NO: 2410; and
the 3′ ITR comprising or consisting of a nucleic acid sequence that is at least 85%, 92%, at least 93%, at least 94%, at least 95%, at least 96%, at least 97%, at least 98%, or at least 99% identical to the nucleic acid sequence of SEQ ID NO: 2411.

41. The recombinant nucleic acid of claim 38, wherein the recombinant nucleic acid is selected from:
(a) a recombinant nucleic acid comprising:
the 5′ ITR comprising or consisting of the nucleic acid sequence of SEQ ID NO: 2408;
the promoter comprising or consisting of the nucleic acid sequence of SEQ ID NO: 2402;
the intron comprising or consisting of the nucleic acid sequence of SEQ ID NO: 2409;
the sequence encoding microdystrophin comprising or consisting of the nucleic acid sequence of SEQ ID NO: 2405;
the first DRG de-targeting miRNA binding site comprising or consisting of the nucleic acid sequence of SEQ ID NO: 2399;
the second DRG de-targeting miRNA binding site comprising or consisting of the nucleic acid sequence of SEQ ID NO: 2399;
the PolyA signal comprising or consisting of the nucleic acid sequence of SEQ ID NO: 2410; and
the 3′ ITR comprising or consisting of the nucleic acid sequence of SEQ ID NO: 2411;
(b) a recombinant nucleic acid comprising:
the 5′ ITR comprising or consisting of the nucleic acid sequence of SEQ ID NO: 2408;
the promoter comprising or consisting of the nucleic acid sequence of SEQ ID NO: 2403;
the intron comprising or consisting of the nucleic acid sequence of SEQ ID NO: 2409;
the sequence encoding microdystrophin comprising or consisting of the nucleic acid sequence of SEQ ID NO: 2405;
the first DRG de-targeting miRNA binding site comprising or consisting of the nucleic acid sequence of SEQ ID NO: 2399;
the second DRG de-targeting miRNA binding site comprising or consisting of the nucleic acid sequence of SEQ ID NO: 2399;
the PolyA signal comprising or consisting of the nucleic acid sequence of SEQ ID NO: 2410; and
the 3′ ITR comprising or consisting of the nucleic acid sequence of SEQ ID NO: 2411;
(c) a recombinant nucleic acid comprising:
the 5′ ITR comprising or consisting of the nucleic acid sequence of SEQ ID NO: 2408;
the promoter comprising or consisting of the nucleic acid sequence of SEQ ID NO: 2404;
the intron comprising or consisting of the nucleic acid sequence of SEQ ID NO: 2409;
the sequence encoding microdystrophin comprising or consisting of the nucleic acid sequence of SEQ ID NO: 2405;
the first DRG de-targeting miRNA binding site comprising or consisting of the nucleic acid sequence of SEQ ID NO: 2399;
the second DRG de-targeting miRNA binding site comprising or consisting of the nucleic acid sequence of SEQ ID NO: 2399;
the PolyA signal comprising or consisting of the nucleic acid sequence of SEQ ID NO: 2410; and
the 3′ ITR comprising or consisting of the nucleic acid sequence of SEQ ID NO: 2411;
(d) a recombinant nucleic acid comprising:
the 5′ ITR comprising or consisting of the nucleic acid sequence of SEQ ID NO: 2408;
the promoter comprising or consisting of the nucleic acid sequence of SEQ ID NO: 2402;
the intron comprises or consists of the nucleic acid sequence of SEQ ID NO: 2409;
the sequence encoding microdystrophin comprising or consisting of the nucleic acid sequence of SEQ ID NO: 2405;
the first DRG de-targeting miRNA binding site comprising or consisting of the nucleic acid sequence of SEQ ID NO: 2400;
the second DRG de-targeting miRNA binding site comprising or consisting of the nucleic acid sequence of SEQ ID NO: 2400;
the PolyA signal comprising or consisting of the nucleic acid sequence of SEQ ID NO: 2410; and
the 3′ ITR comprising or consisting of the nucleic acid sequence of SEQ ID NO: 2411;
(e) a recombinant nucleic acid comprising:
the 5′ ITR comprising or consisting of the nucleic acid sequence of SEQ ID NO: 2408;
the promoter comprising or consisting of the nucleic acid sequence of SEQ ID NO: 2403;
the intron comprising or consisting of the nucleic acid sequence of SEQ ID NO: 2409;
the sequence encoding microdystrophin comprising or consisting of the nucleic acid sequence of SEQ ID NO: 2405;
the first DRG de-targeting miRNA binding site comprising or consisting of the nucleic acid sequence of SEQ ID NO: 2400;
the second DRG de-targeting miRNA binding site comprising or consisting of the nucleic acid sequence of SEQ ID NO: 2400;
the PolyA signal comprising or consisting of the nucleic acid sequence of SEQ ID NO: 2410; and
the 3′ ITR comprising or consisting of the nucleic acid sequence of SEQ ID NO: 2411;
(f) a recombinant nucleic acid comprising:
the 5′ ITR comprising or consisting of the nucleic acid sequence of SEQ ID NO: 2408;
the promoter comprising or consisting of the nucleic acid sequence of SEQ ID NO: 2404;
the intron comprises or consists of the nucleic acid sequence of SEQ ID NO: 2409;
the sequence encoding microdystrophin comprising or consisting of the nucleic acid sequence of SEQ ID NO: 2405;
the first DRG de-targeting miRNA binding site comprising or consisting of the nucleic acid sequence of SEQ ID NO: 2400;
the second DRG de-targeting miRNA binding site comprising or consisting of the nucleic acid sequence of SEQ ID NO: 2400;
the PolyA signal comprising or consisting of the nucleic acid sequence of SEQ ID NO: 2410; and
the 3′ ITR comprising or consisting of the nucleic acid sequence of SEQ ID NO: 2411;
(g) a recombinant nucleic acid comprising:
the 5′ ITR comprising or consisting of the nucleic acid sequence of SEQ ID NO: 2408;
the promoter comprising or consisting of the nucleic acid sequence of SEQ ID NO: 2402;
the intron comprising or consisting of the nucleic acid sequence of SEQ ID NO: 2409;
the sequence encoding microdystrophin comprising or consisting of the nucleic acid sequence of SEQ ID NO: 2405;
the first DRG de-targeting miRNA binding site comprising or consisting of the nucleic acid sequence of SEQ ID NO: 2401;
the first DRG de-targeting miRNA binding site comprising or consisting of the nucleic acid sequence of SEQ ID NO: 2401;
the PolyA signal comprising or consisting of the nucleic acid sequence of SEQ ID NO: 2410; and
the 3′ ITR comprising or consisting of the nucleic acid sequence of SEQ ID NO: 2411;
(h) a recombinant nucleic acid comprising:
the 5′ ITR comprising or consisting of the nucleic acid sequence of SEQ ID NO: 2408;
the promoter comprising or consisting of the nucleic acid sequence of SEQ ID NO: 2403;
the intron comprising or consisting of the nucleic acid sequence of SEQ ID NO: 2409;
the sequence encoding microdystrophin comprising or consisting of the nucleic acid sequence of SEQ ID NO: 2405;
the first DRG de-targeting miRNA binding site comprising or consisting of the nucleic acid sequence of SEQ ID NO: 2401;
the second DRG de-targeting miRNA binding site comprising or consisting of the nucleic acid sequence of SEQ ID NO: 2401;
the PolyA signal comprising or consisting of the nucleic acid sequence of SEQ ID NO: 2410; and
the 3′ ITR comprising or consisting of the nucleic acid sequence of SEQ ID NO: 2411;
(i) a recombinant nucleic acid comprising:
the 5′ ITR comprising or consisting of the nucleic acid sequence of SEQ ID NO: 2408;
the promoter comprising or consisting of the nucleic acid sequence of SEQ ID NO: 2404;
the intron comprises or consists of the nucleic acid sequence of SEQ ID NO: 2409;
the sequence encoding microdystrophin comprising or consisting of the nucleic acid sequence of SEQ ID NO: 2405;
the first DRG de-targeting miRNA binding site comprising or consisting of the nucleic acid sequence of SEQ ID NO: 2401;
the second DRG de-targeting miRNA binding site comprising or consisting of the nucleic acid sequence of SEQ ID NO: 2401;
the PolyA signal comprising or consisting of the nucleic acid sequence of SEQ ID NO: 2410; and
the 3′ ITR comprising or consisting of the nucleic acid sequence of SEQ ID NO: 2411;
(j) a recombinant nucleic acid comprising:
the 5′ ITR comprising or consisting of the nucleic acid sequence of SEQ ID NO: 2408;
the promoter comprising or consisting of the nucleic acid sequence of SEQ ID NO: 2402;
the intron comprises or consists of the nucleic acid sequence of SEQ ID NO: 2409;
the sequence encoding microdystrophin comprising or consisting of the nucleic acid sequence of SEQ ID NO: 2406;
the first DRG de-targeting miRNA binding site comprising or consisting of the nucleic acid sequence of SEQ ID NO: 2399;
the second DRG de-targeting miRNA binding site comprising or consisting of the nucleic acid sequence of SEQ ID NO: 2399;
the PolyA signal comprising or consisting of the nucleic acid sequence of SEQ ID NO: 2410; and
the 3′ ITR comprising or consisting of the nucleic acid sequence of SEQ ID NO: 2411;
(k) a recombinant nucleic acid comprising:
the 5′ comprising or consisting of the nucleic acid sequence of SEQ ID NO: 2408;
the promoter comprising or consisting of the nucleic acid sequence of SEQ ID NO: 2403;
the intron comprising or consisting of the nucleic acid sequence of SEQ ID NO: 2409;
the sequence encoding microdystrophin comprising or consisting of the nucleic acid sequence of SEQ ID NO: 2406;
the first DRG de-targeting miRNA binding site comprising or consisting of the nucleic acid sequence of SEQ ID NO: 2399;
the second DRG de-targeting miRNA binding site comprising or consisting of the nucleic acid sequence of SEQ ID NO: 2399;
the PolyA signal comprising or consisting of the nucleic acid sequence of SEQ ID NO: 2410; and
the 3′ ITR comprising or consisting of the nucleic acid sequence of SEQ ID NO: 2411;
(l) a recombinant nucleic acid comprising:
the 5′ ITR comprising or consisting of the nucleic acid sequence of SEQ ID NO: 2408;
the promoter comprising or consisting of the nucleic acid sequence of SEQ ID NO: 2404;
the intron comprising or consisting of the nucleic acid sequence of SEQ ID NO: 2409;
the sequence encoding microdystrophin comprising or consisting of the nucleic acid sequence of SEQ ID NO: 2406;
the first DRG de-targeting miRNA binding site comprising or consisting of the nucleic acid sequence of SEQ ID NO: 2399;
the second DRG de-targeting miRNA binding site comprising or consisting of the nucleic acid sequence of SEQ ID NO: 2399;
the PolyA signal comprising or consisting of the nucleic acid sequence of SEQ ID NO: 2410; and
the 3′ ITR comprising or consisting of the nucleic acid sequence of SEQ ID NO: 2411;
(m) a recombinant nucleic acid comprising:
the 5′ ITR comprising or consisting of the nucleic acid sequence of SEQ ID NO: 2408;
the promoter comprising or consisting of the nucleic acid sequence of SEQ ID NO: 2402;
the intron comprising or consisting of the nucleic acid sequence of SEQ ID NO: 2409;
the sequence encoding microdystrophin comprising or consisting of the nucleic acid sequence of SEQ ID NO: 2406;
the first DRG de-targeting miRNA binding site comprising or consisting of the nucleic acid sequence of SEQ ID NO: 2400;
the second DRG de-targeting miRNA binding site comprising or consisting of the nucleic acid sequence of SEQ ID NO: 2400;
the PolyA signal comprising or consisting of the nucleic acid sequence of SEQ ID NO: 2410; and
the 3′ ITR comprising or consisting of the nucleic acid sequence of SEQ ID NO: 2411;
(n) a recombinant nucleic acid comprising:
the 5′ ITR comprising or consisting of the nucleic acid sequence of SEQ ID NO: 2408;
the promoter comprising or consisting of the nucleic acid sequence of SEQ ID NO: 2403;
the intron comprising or consisting of the nucleic acid sequence of SEQ ID NO: 2409;
the sequence encoding microdystrophin comprising or consisting of the nucleic acid sequence of SEQ ID NO: 2406;
the first DRG de-targeting miRNA binding site comprising or consisting of the nucleic acid sequence of SEQ ID NO: 2400;
the second DRG de-targeting miRNA binding site comprising or consisting of the nucleic acid sequence of SEQ ID NO: 2400;
the PolyA signal comprising or consisting of the nucleic acid sequence of SEQ ID NO: 2410; and
the 3′ ITR comprising or consisting of the nucleic acid sequence of SEQ ID NO: 2411;
(o) a recombinant nucleic acid comprising:
the 5′ ITR comprising or consisting of the nucleic acid sequence of SEQ ID NO: 2408;
the promoter comprising or consisting of the nucleic acid sequence of SEQ ID NO: 2404;
the intron comprising or consisting of the nucleic acid sequence of SEQ ID NO: 2409;
the sequence encoding microdystrophin comprising or consisting of the nucleic acid sequence of SEQ ID NO: 2406;
the first DRG de-targeting miRNA binding site comprising or consisting of the nucleic acid sequence of SEQ ID NO: 2400;
the second DRG de-targeting miRNA binding site comprising or consisting of the nucleic acid sequence of SEQ ID NO: 2400;
the PolyA signal comprising or consisting of the nucleic acid sequence of SEQ ID NO: 2410; and
the 3′ ITR comprising or consisting of the nucleic acid sequence of SEQ ID NO: 2411;
(p) a recombinant nucleic acid comprising:
the 5′ ITR comprising or consisting of the nucleic acid sequence of SEQ ID NO: 2408;
the promoter comprising or consisting of the nucleic acid sequence of SEQ ID NO: 2402;
the intron comprising or consisting of the nucleic acid sequence of SEQ ID NO: 2409;
the sequence encoding microdystrophin comprising or consisting of the nucleic acid sequence of SEQ ID NO: 2406;
the first DRG de-targeting miRNA binding site comprising or consisting of the nucleic acid sequence of SEQ ID NO: 2401;
the second DRG de-targeting miRNA binding site comprising or consisting of the nucleic acid sequence of SEQ ID NO: 2401;
the PolyA signal comprising or consisting of the nucleic acid sequence of SEQ ID NO: 2410; and
the 3′ ITR comprising or consisting of the nucleic acid sequence of SEQ ID NO: 2411;
(q) a recombinant nucleic acid comprising:
the 5′ ITR comprising or consisting of the nucleic acid sequence of SEQ ID NO: 2408;
the promoter comprising or consisting of the nucleic acid sequence of SEQ ID NO: 2403;
the intron comprising or consisting of the nucleic acid sequence of SEQ ID NO: 2409;
the sequence encoding microdystrophin comprising or consisting of the nucleic acid sequence of SEQ ID NO: 2406;
the first DRG de-targeting miRNA binding site comprising or consisting of the nucleic acid sequence of SEQ ID NO: 2401;
the second DRG de-targeting miRNA binding site comprising or consisting of the nucleic acid sequence of SEQ ID NO: 2401;
the PolyA signal comprising or consisting of the nucleic acid sequence of SEQ ID NO: 2410; and
the 3′ ITR comprising or consisting of the nucleic acid sequence of SEQ ID NO: 2411;
(r) a recombinant nucleic acid comprising:
the 5′ ITR comprising or consisting of the nucleic acid sequence of SEQ ID NO: 2408;
the promoter comprising or consisting of the nucleic acid sequence of SEQ ID NO: 2404;
the intron comprising or consisting of the nucleic acid sequence of SEQ ID NO: 2409;
the sequence encoding microdystrophin comprising or consisting of the nucleic acid sequence of SEQ ID NO: 2406;
the first DRG de-targeting miRNA binding site comprising or consisting of the nucleic acid sequence of SEQ ID NO: 2401;
the second DRG de-targeting miRNA binding site comprising or consisting of the nucleic acid sequence of SEQ ID NO: 2401;
the PolyA signal comprising or consisting of the nucleic acid sequence of SEQ ID NO: 2410; and
the 3′ ITR comprising or consisting of the nucleic acid sequence of SEQ ID NO: 2411;
(s) a recombinant nucleic acid comprising:
the 5′ ITR comprising or consisting of the nucleic acid sequence of SEQ ID NO: 2408;
the promoter comprising or consisting of the nucleic acid sequence of SEQ ID NO: 2402;
the intron comprising or consisting of the nucleic acid sequence of SEQ ID NO: 2409;
the sequence encoding microdystrophin comprising or consisting of the nucleic acid sequence of SEQ ID NO: 2407;
the first DRG de-targeting miRNA binding site comprising or consisting of the nucleic acid sequence of SEQ ID NO: 2399;
the second DRG de-targeting miRNA binding site comprising or consisting of the nucleic acid sequence of SEQ ID NO: 2399;
the PolyA signal comprising or consisting of the nucleic acid sequence of SEQ ID NO: 2410; and
the 3′ ITR comprising or consisting of the nucleic acid sequence of SEQ ID NO: 2411;
(t) a recombinant nucleic acid comprising:
the 5′ ITR comprising or consisting of the nucleic acid sequence of SEQ ID NO: 2408;
the promoter comprising or consisting of the nucleic acid sequence of SEQ ID NO: 2403;
the intron comprising or consisting of the nucleic acid sequence of SEQ ID NO: 2409;
the sequence encoding microdystrophin comprising or consisting of the nucleic acid sequence of SEQ ID NO: 2407;
the first DRG de-targeting miRNA binding site comprising or consisting of the nucleic acid sequence of SEQ ID NO: 2399;
the second DRG de-targeting miRNA binding site comprising or consisting of the nucleic acid sequence of SEQ ID NO: 2399;
the PolyA signal comprising or consisting of the nucleic acid sequence of SEQ ID NO: 2410; and
the 3′ ITR comprising or consisting of the nucleic acid sequence of SEQ ID NO: 2411;
(u) a recombinant nucleic acid comprising:
the 5′ ITR comprising or consisting of the nucleic acid sequence of SEQ ID NO: 2408;
the promoter comprising or consisting of the nucleic acid sequence of SEQ ID NO: 2404;
the intron comprising or consisting of the nucleic acid sequence of SEQ ID NO: 2409;
the sequence encoding microdystrophin comprising or consisting of the nucleic acid sequence of SEQ ID NO: 2407;
the first DRG de-targeting miRNA binding site comprising or consisting of the nucleic acid sequence of SEQ ID NO: 2399;
the second DRG de-targeting miRNA binding site comprising or consisting of the nucleic acid sequence of SEQ ID NO: 2399;
the PolyA signal comprising or consisting of the nucleic acid sequence of SEQ ID NO: 2410; and
the 3′ ITR comprising or consisting of the nucleic acid sequence of SEQ ID NO: 2411;
(v) a recombinant nucleic acid comprising:
the 5′ ITR comprising or consisting of the nucleic acid sequence of SEQ ID NO: 2408;
the promoter comprising or consisting of the nucleic acid sequence of SEQ ID NO: 2402;
the intron comprising or consisting of the nucleic acid sequence of SEQ ID NO: 2409;
the sequence encoding microdystrophin comprising or consisting of the nucleic acid sequence of SEQ ID NO: 2407;
the first DRG de-targeting miRNA binding site comprising or consisting of the nucleic acid sequence of SEQ ID NO: 2400;
the second DRG de-targeting miRNA binding site comprising or consisting of the nucleic acid sequence of SEQ ID NO: 2400;
the PolyA signal comprising or consisting of the nucleic acid sequence of SEQ ID NO: 2410; and
the 3′ ITR comprising or consisting of the nucleic acid sequence of SEQ ID NO: 2411;
(w) a recombinant nucleic acid comprising:
the 5′ ITR comprising or consisting of the nucleic acid sequence of SEQ ID NO: 2408;
the promoter comprising or consisting of the nucleic acid sequence of SEQ ID NO: 2403;
the intron comprising or consisting of the nucleic acid sequence of SEQ ID NO: 2409;
the sequence encoding microdystrophin comprising or consisting of the nucleic acid sequence of SEQ ID NO: 2407;
the first DRG de-targeting miRNA binding site comprising or consisting of the nucleic acid sequence of SEQ ID NO: 2400;
the second DRG de-targeting miRNA binding site comprising or consisting of the nucleic acid sequence of SEQ ID NO: 2400;
the PolyA signal comprising or consisting of the nucleic acid sequence of SEQ ID NO: 2410; and
the 3′ ITR comprising or consisting of the nucleic acid sequence of SEQ ID NO: 2411;
(x) a recombinant nucleic acid comprising:
the 5′ ITR comprising or consisting of the nucleic acid sequence of SEQ ID NO: 2408;
the promoter comprising or consisting of the nucleic acid sequence of SEQ ID NO: 2404;
the intron comprising or consisting of the nucleic acid sequence of SEQ ID NO: 2409;
the sequence encoding microdystrophin comprising or consisting of the nucleic acid sequence of SEQ ID NO: 2407;
the first DRG de-targeting miRNA binding site comprising or consisting of the nucleic acid sequence of SEQ ID NO: 2400;
the second DRG de-targeting miRNA binding site comprising or consisting of the nucleic acid sequence of SEQ ID NO: 2400;
the PolyA signal comprising or consisting of the nucleic acid sequence of SEQ ID NO: 2410; and
the 3′ ITR comprising or consisting of the nucleic acid sequence of SEQ ID NO: 2411;
(y) a recombinant nucleic acid comprising:
the 5′ ITR comprising or consisting of the nucleic acid sequence of SEQ ID NO: 2408;
the promoter comprising or consisting of the nucleic acid sequence of SEQ ID NO: 2402;
the intron comprising or consisting of the nucleic acid sequence of SEQ ID NO: 2409;
the sequence encoding microdystrophin comprising or consisting of the nucleic acid sequence of SEQ ID NO: 2407;
the first DRG de-targeting miRNA binding site comprising or consisting of the nucleic acid sequence of SEQ ID NO: 2401;
the second DRG de-targeting miRNA binding site comprising or consisting of the nucleic acid sequence of SEQ ID NO: 2401;
the PolyA signal comprising or consisting of the nucleic acid sequence of SEQ ID NO: 2410; and
the 3′ ITR comprising or consisting of the nucleic acid sequence of SEQ ID NO: 2411;
(z) a recombinant nucleic acid comprising:
the 5′ ITR comprising or consisting of the nucleic acid sequence of SEQ ID NO: 2408;
the promoter comprising or consisting of the nucleic acid sequence of SEQ ID NO: 2403;
the intron comprising or consisting of the nucleic acid sequence of SEQ ID NO: 2409;
the sequence encoding microdystrophin comprising or consisting of the nucleic acid sequence of SEQ ID NO: 2407;
the first DRG de-targeting miRNA binding site comprising or consisting of the nucleic acid sequence of SEQ ID NO: 2401;
the second DRG de-targeting miRNA binding site comprising or consisting of the nucleic acid sequence of SEQ ID NO: 2401;
the PolyA signal comprising or consisting of the nucleic acid sequence of SEQ ID NO: 2410; and
the 3′ ITR comprising or consisting of the nucleic acid sequence of SEQ ID NO: 2411; and
(aa) a recombinant nucleic acid comprising:
the 5′ ITR comprising or consisting of the nucleic acid sequence of SEQ ID NO: 2408;
the promoter comprising or consisting of the nucleic acid sequence of SEQ ID NO: 2404;
the intron comprising or consisting of the nucleic acid sequence of SEQ ID NO: 2409;
the sequence encoding microdystrophin comprising or consisting of the nucleic acid sequence of SEQ ID NO: 2407;
the first DRG de-targeting miRNA binding site comprising or consisting of the nucleic acid sequence of SEQ ID NO: 2401;
the second DRG de-targeting miRNA binding site comprising or consisting of the nucleic acid sequence of SEQ ID NO: 2401;
the PolyA signal comprising or consisting of the nucleic acid sequence of SEQ ID NO: 2410; and
the 3′ ITR comprising or consisting of the nucleic acid sequence of SEQ ID NO: 2411.

42. The recombinant nucleic acid of claim 1, wherein the recombinant nucleic acid comprises or consists of a nucleic acid sequence that is at least 85%, at least 86%, at least 87%, at least 88%, at least 89%, at least 90%, at least 91%, at least 92%, at least 93%, at least 94%, at least 95%, at least 96%, at least 97%, at least 98%, or at least 99% identical to the nucleic acid sequence of any one of SEQ ID NOs: 2412-2438.

43. (canceled)

44. A recombinant nucleic acid comprising a promoter, wherein the promoter comprises or consists of a nucleic acid sequence that is at least 85%, at least 86%, at least 87%, at least 88%, at least 89%, at least 90%, at least 91%, at least 92%, at least 93%, at least 94%, at least 95%, at least 96%, at least 97%, at least 98%, or at least 99% identical to the nucleic acid sequence of any one of SEQ ID NOs: 2402-2404.

45.-46. (canceled)

47. A recombinant nucleic acid comprising a codon optimized sequence encoding microdystrophin that is at least 85%, at least 86%, at least 87%, at least 88%, at least 89%, at least 90%, at least 91%, at least 92%, at least 93%, at least 94%, at least 95%, at least 96%, at least 97%, at least 98%, or at least 99% identical to the nucleic acid sequence of any one of SEQ ID NOs: 2405-2407.

48.-49. (canceled)

50. An adeno-associated virus (AAV) particle comprising the recombinant nucleic acid of claim 1 and a capsid protein.

51. The AAV particle of claim 50, wherein the capsid protein is derived from a serotype selected from AAV1, AAV2, AAV3, AAV4, AAV5, AAV6, AAV6.2, AAV7, AAV8, AAV9, AAV10, AAV11, AAV12, AAV13, AAVrh, AAVrh10, AAVrh74, AAV-DJ, AAV-DJ/8, Anc80, and AAV7m8, or a derivative, hybrid or chimeric serotype thereof.

52.-53. (canceled)

54. The AAV particle of claim 50, wherein the capsid protein comprises an amino acid sequence of formula (I):
(I)
X₁NX₂X₃X₄RGDRX₅X₆L,
wherein each of X₁-X₆ is any amino acid.

55. (canceled)

56. The AAV particle of claim 54, wherein, relative to a wild type AAV9 capsid, X₁ is a substitution at amino acid 451, X₂ is a substitution at amino acid 453, X₃ is a substitution at amino acid 454, X₄ is a substitution at amino acid 455, and RGDRX₅X₆L is inserted after amino acid 455.

57.-59. (canceled)

60. The AAV particle of claim 54, wherein the amino acid sequence of formula (I) comprises or consists of any one of SEQ ID NOs: 2-800.

61. (canceled)

62. The AAV particle of claim 54, wherein the capsid protein further comprises a deletion of amino acid G267 relative to a wild type AAV9 vector.

63.-64. (canceled)

65. A method of treating Duchenne muscular dystrophy (DMD) in a subject in need thereof, the method comprising administering to the subject an effective amount of the recombinant nucleic acid of claim 1.

66. The method of claim 65, wherein the subject is a human subject.

67. The method of claim 65, wherein the subject has at least one mutation in the dystrophin gene.

68.-72. (canceled)

The application's sequence listing, which the Patent Office published only in electronic form, follows.

SEQUENCE LISTING (2441 sequences)

SEQ ID NO: 1 - protein, 12 aa, synthetic construct
  VARIANT 1: note = Any amino acid
  VARIANT 3: note = Any amino acid
  VARIANT 4: note = Any amino acid
  VARIANT 5: note = Any amino acid
  VARIANT 10: note = Any amino acid
  VARIANT 11: note = Any amino acid
XNXXXRGDRXXL

SEQ ID NO: 2 - protein, 12 aa, synthetic construct
ANASARGDRAAL

SEQ ID NO: 3 - protein, 12 aa, synthetic construct
ANASARGDRGSL

SEQ ID NO: 4 - protein, 12 aa, synthetic construct
ANASARGDRGYL

SEQ ID NO: 5 - protein, 12 aa, synthetic construct
ANASARGDRQAL

SEQ ID NO: 6 - protein, 12 aa, synthetic construct
ANASARGDRQSL

SEQ ID NO: 7 - protein, 12 aa, synthetic construct
ANASARGDRQYL

SEQ ID NO: 8 - protein, 12 aa, synthetic construct
ANASGRGDRAAL

SEQ ID NO: 9 - protein, 12 aa, synthetic construct
ANASGRGDRASL

SEQ ID NO: 10 - protein, 12 aa, synthetic construct
ANASGRGDRAYL

SEQ ID NO: 11 - protein, 12 aa, synthetic construct
ANASGRGDRGAL

SEQ ID NO: 12 - protein, 12 aa, synthetic construct
ANASGRGDRGSL

SEQ ID NO: 13 - protein, 12 aa, synthetic construct
ANASGRGDRGYL

SEQ ID NO: 14 - protein, 12 aa, synthetic construct
ANASGRGDRQAL

SEQ ID NO: 15 - protein, 12 aa, synthetic construct
ANASGRGDRQSL

SEQ ID NO: 16 - protein, 12 aa, synthetic construct
ANASGRGDRQYL

SEQ ID NO: 17 - protein, 12 aa, synthetic construct
ANASMRGDRAAL

SEQ ID NO: 18 - protein, 12 aa, synthetic construct
ANASMRGDRASL

SEQ ID NO: 19 - protein, 12 aa, synthetic construct
ANASMRGDRAYL

SEQ ID NO: 20 - protein, 12 aa, synthetic construct
ANASMRGDRQAL

SEQ ID NO: 21 - protein, 12 aa, synthetic construct
ANASMRGDRQSL

SEQ ID NO: 22 - protein, 12 aa, synthetic construct
ANASSRGDRGSL

SEQ ID NO: 23 - protein, 12 aa, synthetic construct
ANASSRGDRGYL

SEQ ID NO: 24 - protein, 12 aa, synthetic construct
ANASSRGDRQAL

SEQ ID NO: 25 - protein, 12 aa, synthetic construct
ANASSRGDRQSL

SEQ ID NO: 26 - protein, 12 aa, synthetic construct
ANASSRGDRQYL

SEQ ID NO: 27 - protein, 12 aa, synthetic construct
ANASTRGDRASL

SEQ ID NO: 28 - protein, 12 aa, synthetic construct
ANASTRGDRAYL

SEQ ID NO: 29 - protein, 12 aa, synthetic construct
ANASTRGDRGAL

SEQ ID NO: 30 - protein, 12 aa, synthetic construct
ANASTRGDRGSL

SEQ ID NO: 31 - protein, 12 aa, synthetic construct
ANASTRGDRGYL

SEQ ID NO: 32 - protein, 12 aa, synthetic construct
ANASTRGDRQAL

SEQ ID NO: 33 - protein, 12 aa, synthetic construct
ANASTRGDRQSL

SEQ ID NO: 34 - protein, 12 aa, synthetic construct
ANASTRGDRQYL

SEQ ID NO: 35 - protein, 12 aa, synthetic construct
ANASVRGDRASL

SEQ ID NO: 36 - protein, 12 aa, synthetic construct
ANASVRGDRGYL

SEQ ID NO: 37 - protein, 12 aa, synthetic construct
ANASVRGDRQAL

SEQ ID NO: 38 - protein, 12 aa, synthetic construct
ANASVRGDRQSL

SEQ ID NO: 39 - protein, 12 aa, synthetic construct
ANASVRGDRQYL

SEQ ID NO: 40 - protein, 12 aa, synthetic construct
ANGNFRGDRQNL

SEQ ID NO: 41 - protein, 12 aa, synthetic construct
ANGNVRGDRGML

SEQ ID NO: 42 - protein, 12 aa, synthetic construct
ANGSARGDRAYL

SEQ ID NO: 43 - protein, 12 aa, synthetic construct
ANGSARGDRGSL

SEQ ID NO: 44 - protein, 12 aa, synthetic construct
ANGSARGDRGYL

SEQ ID NO: 45 - protein, 12 aa, synthetic construct
ANGSARGDRQAL

SEQ ID NO: 46 - protein, 12 aa, synthetic construct
ANGSARGDRQYL

SEQ ID NO: 47 - protein, 12 aa, synthetic construct
ANGSGRGDRAAL

SEQ ID NO: 48 - protein, 12 aa, synthetic construct
ANGSGRGDRAYL

SEQ ID NO: 49 - protein, 12 aa, synthetic construct
ANGSGRGDRGAL

SEQ ID NO: 50 - protein, 12 aa, synthetic construct
ANGSGRGDRGSL

SEQ ID NO: 51 - protein, 12 aa, synthetic construct
ANGSGRGDRGYL

SEQ ID NO: 52 - protein, 12 aa, synthetic construct
ANGSGRGDRQAL

SEQ ID NO: 53 - protein, 12 aa, synthetic construct
ANGSGRGDRQSL

SEQ ID NO: 54 - protein, 12 aa, synthetic construct
ANGSGRGDRQYL

SEQ ID NO: 55 - protein, 12 aa, synthetic construct
ANGSMRGDRGYL

SEQ ID NO: 56 - protein, 12 aa, synthetic construct
ANGSMRGDRQAL

SEQ ID NO: 57 - protein, 12 aa, synthetic construct
ANGSMRGDRQSL

SEQ ID NO: 58 - protein, 12 aa, synthetic construct
ANGSMRGDRQYL

SEQ ID NO: 59 - protein, 12 aa, synthetic construct
ANGSSRGDRAYL

SEQ ID NO: 60 - protein, 12 aa, synthetic construct
ANGSSRGDRGSL

SEQ ID NO: 61 - protein, 12 aa, synthetic construct
ANGSSRGDRGYL

SEQ ID NO: 62 - protein, 12 aa, synthetic construct
ANGSSRGDRQAL

SEQ ID NO: 63 - protein, 12 aa, synthetic construct
ANGSSRGDRQSL

SEQ ID NO: 64 - protein, 12 aa, synthetic construct
ANGSSRGDRQYL

SEQ ID NO: 65 - protein, 12 aa, synthetic construct
ANGSTRGDRAAL

SEQ ID NO: 66 - protein, 12 aa, synthetic construct
ANGSTRGDRAYL

SEQ ID NO: 67 - protein, 12 aa, synthetic construct
ANGSTRGDRGAL

SEQ ID NO: 68 - protein, 12 aa, synthetic construct
ANGSTRGDRGYL

SEQ ID NO: 69 - protein, 12 aa, synthetic construct
ANGSTRGDRQAL

SEQ ID NO: 70 - protein, 12 aa, synthetic construct
ANGSTRGDRQSL

SEQ ID NO: 71 - protein, 12 aa, synthetic construct
ANGSTRGDRQYL

SEQ ID NO: 72 - protein, 12 aa, synthetic construct
ANGSVRGDRAYL

SEQ ID NO: 73 - protein, 12 aa, synthetic construct
ANGSVRGDRGYL

SEQ ID NO: 74 - protein, 12 aa, synthetic construct
ANGSVRGDRQAL

SEQ ID NO: 75 - protein, 12 aa, synthetic construct
ANGSVRGDRQYL

SEQ ID NO: 76 - protein, 12 aa, synthetic construct
ANSGMRGDRGAL

SEQ ID NO: 77 - protein, 12 aa, synthetic construct
ANSSARGDRGAL

SEQ ID NO: 78 - protein, 12 aa, synthetic construct
ANSSARGDRGSL

SEQ ID NO: 79 - protein, 12 aa, synthetic construct
ANSSARGDRGYL

SEQ ID NO: 80 - protein, 12 aa, synthetic construct
ANSSARGDRQAL

SEQ ID NO: 81 - protein, 12 aa, synthetic construct
ANSSARGDRQSL

SEQ ID NO: 82 - protein, 12 aa, synthetic construct
ANSSARGDRQYL

SEQ ID NO: 83 - protein, 12 aa, synthetic construct
ANSSGRGDRAAL

SEQ ID NO: 84 - protein, 12 aa, synthetic construct
ANSSGRGDRASL

SEQ ID NO: 85 - protein, 12 aa, synthetic construct
ANSSGRGDRAYL

SEQ ID NO: 86 - protein, 12 aa, synthetic construct
ANSSGRGDRGAL

SEQ ID NO: 87 - protein, 12 aa, synthetic construct
ANSSGRGDRGSL

SEQ ID NO: 88 - protein, 12 aa, synthetic construct
ANSSGRGDRGYL

SEQ ID NO: 89 - protein, 12 aa, synthetic construct
ANSSGRGDRQAL

SEQ ID NO: 90 - protein, 12 aa, synthetic construct
ANSSGRGDRQSL

SEQ ID NO: 91 - protein, 12 aa, synthetic construct
ANSSGRGDRQYL

SEQ ID NO: 92 - protein, 12 aa, synthetic construct
ANSSMRGDRAYL

SEQ ID NO: 93 - protein, 12 aa, synthetic construct
ANSSMRGDRQAL

SEQ ID NO: 94 - protein, 12 aa, synthetic construct
ANSSMRGDRQSL

SEQ ID NO: 95 - protein, 12 aa, synthetic construct
ANSSMRGDRQYL

SEQ ID NO: 96 - protein, 12 aa, synthetic construct
ANSSSRGDRGSL

SEQ ID NO: 97 - protein, 12 aa, synthetic construct
ANSSSRGDRGYL

SEQ ID NO: 98 - protein, 12 aa, synthetic construct
ANSSSRGDRQAL

SEQ ID NO: 99 - protein, 12 aa, synthetic construct
ANSSSRGDRQSL

SEQ ID NO: 100 - protein, 12 aa, synthetic construct
ANSSSRGDRQYL

SEQ ID NO: 101 - protein, 12 aa, synthetic construct
ANSSTRGDRAAL

SEQ ID NO: 102 - protein, 12 aa, synthetic construct
ANSSTRGDRGSL

SEQ ID NO: 103 - protein, 12 aa, synthetic construct
ANSSTRGDRQAL

SEQ ID NO: 104 - protein, 12 aa, synthetic construct
ANSSTRGDRQSL

SEQ ID NO: 105 - protein, 12 aa, synthetic construct
ANSSTRGDRQYL

SEQ ID NO: 106 - protein, 12 aa, synthetic construct
ANSSVRGDRAYL

SEQ ID NO: 107 - protein, 12 aa, synthetic construct
ANSSVRGDRGYL

SEQ ID NO: 108 - protein, 12 aa, synthetic construct
ANSSVRGDRQAL

SEQ ID NO: 109 - protein, 12 aa, synthetic construct
ANSSVRGDRQSL

SEQ ID NO: 110 - protein, 12 aa, synthetic construct
ANSSVRGDRQYL

SEQ ID NO: 111 - protein, 12 aa, synthetic construct
ANTSARGDRAYL

SEQ ID NO: 112 - protein, 12 aa, synthetic construct
ANTSARGDRGAL

SEQ ID NO: 113 - protein, 12 aa, synthetic construct
ANTSARGDRGSL

SEQ ID NO: 114 - protein, 12 aa, synthetic construct
ANTSARGDRGYL

SEQ ID NO: 115 - protein, 12 aa, synthetic construct
ANTSARGDRQAL

SEQ ID NO: 116 - protein, 12 aa, synthetic construct
ANTSARGDRQYL

SEQ ID NO: 117 - protein, 12 aa, synthetic construct
ANTSGRGDRASL

SEQ ID NO: 118 - protein, 12 aa, synthetic construct
ANTSGRGDRGAL

SEQ ID NO: 119 - protein, 12 aa, synthetic construct
ANTSGRGDRGSL

SEQ ID NO: 120 - protein, 12 aa, synthetic construct
ANTSGRGDRGYL

SEQ ID NO: 121 - protein, 12 aa, synthetic construct
ANTSGRGDRQAL

SEQ ID NO: 122 - protein, 12 aa, synthetic construct
ANTSGRGDRQSL

SEQ ID NO: 123 - protein, 12 aa, synthetic construct
ANTSGRGDRQYL

SEQ ID NO: 124 - protein, 12 aa, synthetic construct
ANTSMRGDRAYL

SEQ ID NO: 125 - protein, 12 aa, synthetic construct
ANTSMRGDRQAL

SEQ ID NO: 126 - protein, 12 aa, synthetic construct
ANTSMRGDRQSL

SEQ ID NO: 127 - protein, 12 aa, synthetic construct
ANTSMRGDRQYL

SEQ ID NO: 128 - protein, 12 aa, synthetic construct
ANTSSRGDRGSL

SEQ ID NO: 129 - protein, 12 aa, synthetic construct
ANTSSRGDRQAL

SEQ ID NO: 130 - protein, 12 aa, synthetic construct
ANTSSRGDRQYL

SEQ ID NO: 131 - protein, 12 aa, synthetic construct
ANTSTRGDRAAL

SEQ ID NO: 132 - protein, 12 aa, synthetic construct
ANTSTRGDRQAL

SEQ ID NO: 133 - protein, 12 aa, synthetic construct
ANTSTRGDRQSL

SEQ ID NO: 134 - protein, 12 aa, synthetic construct
ANTSTRGDRQYL

SEQ ID NO: 135 - protein, 12 aa, synthetic construct
ANTSVRGDRAYL

SEQ ID NO: 136 - protein, 12 aa, synthetic construct
ANTSVRGDRGSL

SEQ ID NO: 137 - protein, 12 aa, synthetic construct
ANTSVRGDRQAL

SEQ ID NO: 138 - protein, 12 aa, synthetic construct
ANTSVRGDRQSL

SEQ ID NO: 139 - protein, 12 aa, synthetic construct
ANTSVRGDRQYL

SEQ ID NO: 140 - protein, 12 aa, synthetic construct
ANYPHRGDRGAL

SEQ ID NO: 141 - protein, 12 aa, synthetic construct
ANYSARGDRAAL

SEQ ID NO: 142 - protein, 12 aa, synthetic construct
ANYSARGDRASL

SEQ ID NO: 143 - protein, 12 aa, synthetic construct
ANYSARGDRGAL

SEQ ID NO: 144 - protein, 12 aa, synthetic construct
ANYSARGDRGSL

SEQ ID NO: 145 - protein, 12 aa, synthetic construct
ANYSARGDRQAL

SEQ ID NO: 146 - protein, 12 aa, synthetic construct
ANYSARGDRQSL

SEQ ID NO: 147 - protein, 12 aa, synthetic construct
ANYSGRGDRAAL

SEQ ID NO: 148 - protein, 12 aa, synthetic construct
ANYSGRGDRASL

SEQ ID NO: 149 - protein, 12 aa, synthetic construct
ANYSGRGDRGAL

SEQ ID NO: 150 - protein, 12 aa, synthetic construct
ANYSGRGDRGSL

SEQ ID NO: 151 - protein, 12 aa, synthetic construct
ANYSGRGDRQAL

SEQ ID NO: 152 - protein, 12 aa, synthetic construct
ANYSGRGDRQSL

SEQ ID NO: 153 - protein, 12 aa, synthetic construct
ANYSGRGDRQYL

SEQ ID NO: 154 - protein, 12 aa, synthetic construct
ANYSMRGDRAAL

SEQ ID NO: 155 - protein, 12 aa, synthetic construct
ANYSMRGDRASL

SEQ ID NO: 156 - protein, 12 aa, synthetic construct
ANYSMRGDRAYL

SEQ ID NO: 157 - protein, 12 aa, synthetic construct
ANYSMRGDRQAL

SEQ ID NO: 158 - protein, 12 aa, synthetic construct
ANYSMRGDRQSL

SEQ ID NO: 159 - protein, 12 aa, synthetic construct
ANYSSRGDRGAL

SEQ ID NO: 160 - protein, 12 aa, synthetic construct
ANYSSRGDRGSL

SEQ ID NO: 161 - protein, 12 aa, synthetic construct
ANYSSRGDRQAL

SEQ ID NO: 162 - protein, 12 aa, synthetic construct
ANYSSRGDRQSL

SEQ ID NO: 163 - protein, 12 aa, synthetic construct
ANYSSRGDRQYL

SEQ ID NO: 164 - protein, 12 aa, synthetic construct
ANYSTRGDRQAL

SEQ ID NO: 165 - protein, 12 aa, synthetic construct
ANYSTRGDRQSL

SEQ ID NO: 166 - protein, 12 aa, synthetic construct
ANYSTRGDRQYL

SEQ ID NO: 167 - protein, 12 aa, synthetic construct
ANYSVRGDRQAL

SEQ ID NO: 168 - protein, 12 aa, synthetic construct
ANYSVRGDRQSL

SEQ ID NO: 169 - protein, 12 aa, synthetic construct
ANYSVRGDRQYL

SEQ ID NO: 170 - protein, 12 aa, synthetic construct
FNSGMRGDRGAL

SEQ ID NO: 171 - protein, 12 aa, synthetic construct
GNSGMRGDRGAL

SEQ ID NO: 172 - protein, 12 aa, synthetic construct
HNSGMRGDRGAL

SEQ ID NO: 173 - protein, 12 aa, synthetic construct
LNASARGDRAAL

SEQ ID NO: 174 - protein, 12 aa, synthetic construct
LNASARGDRASL

SEQ ID NO: 175 - protein, 12 aa, synthetic construct
LNASARGDRAYL

SEQ ID NO: 176 - protein, 12 aa, synthetic construct
LNASARGDRGAL

SEQ ID NO: 177 - protein, 12 aa, synthetic construct
LNASARGDRGSL

SEQ ID NO: 178 - protein, 12 aa, synthetic construct
LNASARGDRGYL

SEQ ID NO: 179 - protein, 12 aa, synthetic construct
LNASARGDRQAL

SEQ ID NO: 180 - protein, 12 aa, synthetic construct
LNASARGDRQSL

SEQ ID NO: 181 - protein, 12 aa, synthetic construct
LNASARGDRQYL

SEQ ID NO: 182 - protein, 12 aa, synthetic construct
LNASGRGDRAAL

SEQ ID NO: 183 - protein, 12 aa, synthetic construct
LNASGRGDRASL

SEQ ID NO: 184 - protein, 12 aa, synthetic construct
LNASGRGDRAYL

SEQ ID NO: 185 - protein, 12 aa, synthetic construct
LNASGRGDRGAL

SEQ ID NO: 186 - protein, 12 aa, synthetic construct
LNASGRGDRGSL

SEQ ID NO: 187 - protein, 12 aa, synthetic construct
LNASGRGDRGYL

SEQ ID NO: 188 - protein, 12 aa, synthetic construct
LNASGRGDRQAL

SEQ ID NO: 189 - protein, 12 aa, synthetic construct
LNASGRGDRQSL

SEQ ID NO: 190 - protein, 12 aa, synthetic construct
LNASGRGDRQYL

SEQ ID NO: 191 - protein, 12 aa, synthetic construct
LNASIRGDRQLL

SEQ ID NO: 192 - protein, 12 aa, synthetic construct
LNASMRGDRAAL

SEQ ID NO: 193 - protein, 12 aa, synthetic construct
LNASMRGDRASL

SEQ ID NO: 194 - protein, 12 aa, synthetic construct
LNASMRGDRAYL

SEQ ID NO: 195 - protein, 12 aa, synthetic construct
LNASMRGDRGAL

SEQ ID NO: 196 - protein, 12 aa, synthetic construct
LNASMRGDRGSL

SEQ ID NO: 197 - protein, 12 aa, synthetic construct
LNASMRGDRGYL

SEQ ID NO: 198 - protein, 12 aa, synthetic construct
LNASMRGDRQAL

SEQ ID NO: 199 - protein, 12 aa, synthetic construct
LNASMRGDRQSL

SEQ ID NO: 200 - protein, 12 aa, synthetic construct
LNASMRGDRQYL

SEQ ID NO: 201 - protein, 12 aa, synthetic construct
LNASSRGDRAAL

SEQ ID NO: 202 - protein, 12 aa, synthetic construct
LNASSRGDRASL

SEQ ID NO: 203 - protein, 12 aa, synthetic construct
LNASSRGDRGAL

SEQ ID NO: 204 - protein, 12 aa, synthetic construct
LNASSRGDRGSL

SEQ ID NO: 205 - protein, 12 aa, synthetic construct
LNASSRGDRQAL

SEQ ID NO: 206 - protein, 12 aa, synthetic construct
LNASSRGDRQSL

SEQ ID NO: 207 - protein, 12 aa, synthetic construct
LNASSRGDRQYL

SEQ ID NO: 208 - protein, 12 aa, synthetic construct
LNASTRGDRAAL

SEQ ID NO: 209 - protein, 12 aa, synthetic construct
LNASTRGDRASL

SEQ ID NO: 210 - protein, 12 aa, synthetic construct
LNASTRGDRGAL

SEQ ID NO: 211 - protein, 12 aa, synthetic construct
LNASTRGDRGSL

SEQ ID NO: 212 - protein, 12 aa, synthetic construct
LNASTRGDRGYL

SEQ ID NO: 213 - protein, 12 aa, synthetic construct
LNASTRGDRQAL

SEQ ID NO: 214 - protein, 12 aa, synthetic construct
LNASTRGDRQSL

SEQ ID NO: 215 - protein, 12 aa, synthetic construct
LNASTRGDRQYL

SEQ ID NO: 216 - protein, 12 aa, synthetic construct
LNASVRGDRAAL

SEQ ID NO: 217 - protein, 12 aa, synthetic construct
LNASVRGDRASL

SEQ ID NO: 218 - protein, 12 aa, synthetic construct
LNASVRGDRGAL

SEQ ID NO: 219 - protein, 12 aa, synthetic construct
LNASVRGDRGSL

SEQ ID NO: 220 - protein, 12 aa, synthetic construct
LNASVRGDRQAL

SEQ ID NO: 221 - protein, 12 aa, synthetic construct
LNASVRGDRQSL

SEQ ID NO: 222 - protein, 12 aa, synthetic construct
LNASVRGDRQYL

SEQ ID NO: 223 - protein, 12 aa, synthetic construct
LNGNFRGDRQNL

SEQ ID NO: 224 - protein, 12 aa, synthetic construct
LNGNVRGDRGML

SEQ ID NO: 225 - protein, 12 aa, synthetic construct
LNGSARGDRAAL

SEQ ID NO: 226 - protein, 12 aa, synthetic construct
LNGSARGDRAYL

SEQ ID NO: 227 - protein, 12 aa, synthetic construct
LNGSARGDRGSL

SEQ ID NO: 228 - protein, 12 aa, synthetic construct
LNGSARGDRGYL

SEQ ID NO: 229 - protein, 12 aa, synthetic construct
LNGSARGDRQAL

SEQ ID NO: 230 - protein, 12 aa, synthetic construct
LNGSARGDRQSL

SEQ ID NO: 231 - protein, 12 aa, synthetic construct
LNGSARGDRQYL

SEQ ID NO: 232 - protein, 12 aa, synthetic construct
LNGSGRGDRAAL

SEQ ID NO: 233 - protein, 12 aa, synthetic construct
LNGSGRGDRAYL

SEQ ID NO: 234 - protein, 12 aa, synthetic construct
LNGSGRGDRGAL

SEQ ID NO: 235 - protein, 12 aa, synthetic construct
LNGSGRGDRGSL

SEQ ID NO: 236 - protein, 12 aa, synthetic construct
LNGSGRGDRGYL

SEQ ID NO: 237 - protein, 12 aa, synthetic construct
LNGSGRGDRQAL

SEQ ID NO: 238 - protein, 12 aa, synthetic construct
LNGSGRGDRQYL

SEQ ID NO: 239 - protein, 12 aa, synthetic construct
LNGSMRGDRASL

SEQ ID NO: 240 - protein, 12 aa, synthetic construct
LNGSMRGDRGYL

SEQ ID NO: 241 - protein, 12 aa, synthetic construct
LNGSMRGDRQAL

SEQ ID NO: 242 - protein, 12 aa, synthetic construct
LNGSMRGDRQSL

SEQ ID NO: 243 - protein, 12 aa, synthetic construct
LNGSMRGDRQYL

SEQ ID NO: 244 - protein, 12 aa, synthetic construct
LNGSSRGDRAAL

SEQ ID NO: 245 - protein, 12 aa, synthetic construct
LNGSSRGDRAYL

SEQ ID NO: 246 - protein, 12 aa, synthetic construct
LNGSSRGDRGAL

SEQ ID NO: 247 - protein, 12 aa, synthetic construct
LNGSSRGDRQYL

SEQ ID NO: 248 - protein, 12 aa, synthetic construct
LNGSTRGDRAAL

SEQ ID NO: 249 - protein, 12 aa, synthetic construct
LNGSTRGDRASL

SEQ ID NO: 250 - protein, 12 aa, synthetic construct
LNGSTRGDRAYL

SEQ ID NO: 251 - protein, 12 aa, synthetic construct
LNGSTRGDRGAL

SEQ ID NO: 252 - protein, 12 aa, synthetic construct
LNGSTRGDRGSL

SEQ ID NO: 253 - protein, 12 aa, synthetic construct
LNGSTRGDRGYL

SEQ ID NO: 254 - protein, 12 aa, synthetic construct
LNGSTRGDRQAL

SEQ ID NO: 255 - protein, 12 aa, synthetic construct
LNGSTRGDRQSL

SEQ ID NO: 256 - protein, 12 aa, synthetic construct
LNGSTRGDRQYL

SEQ ID NO: 257 - protein, 12 aa, synthetic construct
LNGSVRGDRASL

SEQ ID NO: 258 - protein, 12 aa, synthetic construct
LNGSVRGDRAYL

SEQ ID NO: 259 - protein, 12 aa, synthetic construct
LNGSVRGDRGYL

SEQ ID NO: 260 - protein, 12 aa, synthetic construct
LNGSVRGDRQAL

SEQ ID NO: 261 - protein, 12 aa, synthetic construct
LNGSVRGDRQSL

SEQ ID NO: 262 - protein, 12 aa, synthetic construct
LNGSVRGDRQYL

SEQ ID NO: 263 - protein, 12 aa, synthetic construct
LNSGMRGDRGAL

SEQ ID NO: 264 - protein, 12 aa, synthetic construct
LNSSARGDRASL

SEQ ID NO: 265 - protein, 12 aa, synthetic construct
LNSSARGDRAYL

SEQ ID NO: 266 - protein, 12 aa, synthetic construct
LNSSARGDRGAL

SEQ ID NO: 267 - protein, 12 aa, synthetic construct
LNSSARGDRGIL

SEQ ID NO: 268 - protein, 12 aa, synthetic construct
LNSSARGDRGSL

SEQ ID NO: 269 - protein, 12 aa, synthetic construct
LNSSARGDRGYL

SEQ ID NO: 270 - protein, 12 aa, synthetic construct
LNSSARGDRQAL

SEQ ID NO: 271 - protein, 12 aa, synthetic construct
LNSSARGDRQSL

SEQ ID NO: 272 - protein, 12 aa, synthetic construct
LNSSARGDRQYL

SEQ ID NO: 273 - protein, 12 aa, synthetic construct
LNSSGRGDRAAL

SEQ ID NO: 274 - protein, 12 aa, synthetic construct
LNSSGRGDRASL

SEQ ID NO: 275 - protein, 12 aa, synthetic construct
LNSSGRGDRAYL

SEQ ID NO: 276 - protein, 12 aa, synthetic construct
LNSSGRGDRGAL

SEQ ID NO: 277 - protein, 12 aa, synthetic construct
LNSSGRGDRGSL

SEQ ID NO: 278 - protein, 12 aa, synthetic construct
LNSSGRGDRGYL

SEQ ID NO: 279 - protein, 12 aa, synthetic construct
LNSSGRGDRQAL

SEQ ID NO: 280 - protein, 12 aa, synthetic construct
LNSSGRGDRQSL

SEQ ID NO: 281 - protein, 12 aa, synthetic construct
LNSSGRGDRQYL

SEQ ID NO: 282 - protein, 12 aa, synthetic construct
LNSSMRGDRAAL

SEQ ID NO: 283 - protein, 12 aa, synthetic construct
LNSSMRGDRASL

SEQ ID NO: 284 - protein, 12 aa, synthetic construct
LNSSMRGDRAYL

SEQ ID NO: 285 - protein, 12 aa, synthetic construct
LNSSMRGDRGAL

SEQ ID NO: 286 - protein, 12 aa, synthetic construct
LNSSMRGDRGSL

SEQ ID NO: 287 - protein, 12 aa, synthetic construct
LNSSMRGDRQAL

SEQ ID NO: 288 - protein, 12 aa, synthetic construct
LNSSMRGDRQSL

SEQ ID NO: 289 - protein, 12 aa, synthetic construct
LNSSMRGDRQYL

SEQ ID NO: 290 - protein, 12 aa, synthetic construct
LNSSSRGDRAAL

SEQ ID NO: 291 - protein, 12 aa, synthetic construct
LNSSSRGDRGAL

SEQ ID NO: 292 - protein, 12 aa, synthetic construct
LNSSSRGDRGSL

SEQ ID NO: 293 - protein, 12 aa, synthetic construct
LNSSSRGDRQAL

SEQ ID NO: 294 - protein, 12 aa, synthetic construct
LNSSSRGDRQSL

SEQ ID NO: 295 - protein, 12 aa, synthetic construct
LNSSSRGDRQYL

SEQ ID NO: 296 - protein, 12 aa, synthetic construct
LNSSTRGDRAAL

SEQ ID NO: 297 - protein, 12 aa, synthetic construct
LNSSTRGDRASL

SEQ ID NO: 298 - protein, 12 aa, synthetic construct
LNSSTRGDRGAL

SEQ ID NO: 299 - protein, 12 aa, synthetic construct
LNSSTRGDRGSL

SEQ ID NO: 300 - protein, 12 aa, synthetic construct
LNSSTRGDRQAL

SEQ ID NO: 301 - protein, 12 aa, synthetic construct
LNSSTRGDRQSL

SEQ ID NO: 302 - protein, 12 aa, synthetic construct
LNSSTRGDRQYL

SEQ ID NO: 303 - protein, 12 aa, synthetic construct
LNSSVRGDRAAL

SEQ ID NO: 304 - protein, 12 aa, synthetic construct
LNSSVRGDRASL

SEQ ID NO: 305 - protein, 12 aa, synthetic construct
LNSSVRGDRGAL

SEQ ID NO: 306 - protein, 12 aa, synthetic construct
LNSSVRGDRGSL

SEQ ID NO: 307 - protein, 12 aa, synthetic construct
LNSSVRGDRGYL

SEQ ID NO: 308 - protein, 12 aa, synthetic construct
LNSSVRGDRQAL

SEQ ID NO: 309 - protein, 12 aa, synthetic construct
LNSSVRGDRQSL

SEQ ID NO: 310 - protein, 12 aa, synthetic construct
LNSSVRGDRQYL

SEQ ID NO: 311 - protein, 12 aa, synthetic construct
LNTSARGDRAAL

SEQ ID NO: 312 - protein, 12 aa, synthetic construct
LNTSARGDRASL

SEQ ID NO: 313 - protein, 12 aa, synthetic construct
LNTSARGDRAYL

SEQ ID NO: 314 - protein, 12 aa, synthetic construct
LNTSARGDRGAL

SEQ ID NO: 315 - protein, 12 aa, synthetic construct
LNTSARGDRGSL

SEQ ID NO: 316 - protein, 12 aa, synthetic construct
LNTSARGDRGYL

SEQ ID NO: 317 - protein, 12 aa, synthetic construct
LNTSARGDRQAL

SEQ ID NO: 318 - protein, 12 aa, synthetic construct
LNTSARGDRQSL

SEQ ID NO: 319 - protein, 12 aa, synthetic construct
LNTSARGDRQYL

SEQ ID NO: 320 - protein, 12 aa, synthetic construct
LNTSGRGDRAAL

SEQ ID NO: 321 - protein, 12 aa, synthetic construct
LNTSGRGDRASL

SEQ ID NO: 322 - protein, 12 aa, synthetic construct
LNTSGRGDRAYL

SEQ ID NO: 323 - protein, 12 aa, synthetic construct
LNTSGRGDRGAL

SEQ ID NO: 324 - protein, 12 aa, synthetic construct
LNTSGRGDRGSL

SEQ ID NO: 325 - protein, 12 aa, synthetic construct
LNTSGRGDRGYL

SEQ ID NO: 326 - protein, 12 aa, synthetic construct
LNTSGRGDRQAL

SEQ ID NO: 327 - protein, 12 aa, synthetic construct
LNTSGRGDRQSL

SEQ ID NO: 328 - protein, 12 aa, synthetic construct
LNTSGRGDRQYL

SEQ ID NO: 329 - protein, 12 aa, synthetic construct
LNTSMRGDRAAL

SEQ ID NO: 330 - protein, 12 aa, synthetic construct
LNTSMRGDRASL

SEQ ID NO: 331 - protein, 12 aa, synthetic construct
LNTSMRGDRAYL

SEQ ID NO: 332 - protein, 12 aa, synthetic construct
LNTSMRGDRGAL

SEQ ID NO: 333 - protein, 12 aa, synthetic construct
LNTSMRGDRGSL

SEQ ID NO: 334 - protein, 12 aa, synthetic construct
LNTSMRGDRQAL

SEQ ID NO: 335 - protein, 12 aa, synthetic construct
LNTSMRGDRQSL

SEQ ID NO: 336 - protein, 12 aa, synthetic construct
LNTSMRGDRQYL

SEQ ID NO: 337 - protein, 12 aa, synthetic construct
LNTSSRGDRAAL

SEQ ID NO: 338 - protein, 12 aa, synthetic construct
LNTSSRGDRGSL

SEQ ID NO: 339 - protein, 12 aa, synthetic construct
LNTSSRGDRQAL

SEQ ID NO: 340 - protein, 12 aa, synthetic construct
LNTSSRGDRQSL

SEQ ID NO: 341 - protein, 12 aa, synthetic construct
LNTSSRGDRQYL

SEQ ID NO: 342 - protein, 12 aa, synthetic construct
LNTSTRGDRAAL

SEQ ID NO: 343 - protein, 12 aa, synthetic construct
LNTSTRGDRASL

SEQ ID NO: 344 - protein, 12 aa, synthetic construct
LNTSTRGDRGAL

SEQ ID NO: 345 - protein, 12 aa, synthetic construct
LNTSTRGDRGSL

SEQ ID NO: 346 - protein, 12 aa, synthetic construct
LNTSTRGDRQAL

SEQ ID NO: 347 - protein, 12 aa, synthetic construct
LNTSTRGDRQSL

SEQ ID NO: 348 - protein, 12 aa, synthetic construct
LNTSTRGDRQYL

SEQ ID NO: 349 - protein, 12 aa, synthetic construct
LNTSVRGDRAAL

SEQ ID NO: 350 - protein, 12 aa, synthetic construct
LNTSVRGDRASL

SEQ ID NO: 351 - protein, 12 aa, synthetic construct
LNTSVRGDRAYL

SEQ ID NO: 352 - protein, 12 aa, synthetic construct
LNTSVRGDRGAL

SEQ ID NO: 353 - protein, 12 aa, synthetic construct
LNTSVRGDRGSL

SEQ ID NO: 354 - protein, 12 aa, synthetic construct
LNTSVRGDRQAL

SEQ ID NO: 355 - protein, 12 aa, synthetic construct
LNTSVRGDRQSL

SEQ ID NO: 356 - protein, 12 aa, synthetic construct
LNYPHRGDRGAL

SEQ ID NO: 357 - protein, 12 aa, synthetic construct
LNYSARGDRGAL

SEQ ID NO: 358 - protein, 12 aa, synthetic construct
LNYSARGDRGSL

SEQ ID NO: 359 - protein, 12 aa, synthetic construct
LNYSARGDRQAL

SEQ ID NO: 360 - protein, 12 aa, synthetic construct
LNYSARGDRQSL

SEQ ID NO: 361 - protein, 12 aa, synthetic construct
LNYSARGDRQYL

SEQ ID NO: 362 - protein, 12 aa, synthetic construct
LNYSGRGDRAAL

SEQ ID NO: 363 - protein, 12 aa, synthetic construct
LNYSGRGDRASL

SEQ ID NO: 364 - protein, 12 aa, synthetic construct
LNYSGRGDRGAL

SEQ ID NO: 365 - protein, 12 aa, synthetic construct
LNYSGRGDRGSL

SEQ ID NO: 366 - protein, 12 aa, synthetic construct
LNYSGRGDRQAL

SEQ ID NO: 367 - protein, 12 aa, synthetic construct
LNYSGRGDRQSL

SEQ ID NO: 368 - protein, 12 aa, synthetic construct
LNYSGRGDRQYL

SEQ ID NO: 369 - protein, 12 aa, synthetic construct
LNYSMRGDRQAL

SEQ ID NO: 370 - protein, 12 aa, synthetic construct
LNYSMRGDRQSL

SEQ ID NO: 371 - protein, 12 aa, synthetic construct
LNYSSRGDRGAL

SEQ ID NO: 372 - protein, 12 aa, synthetic construct
LNYSSRGDRGSL

SEQ ID NO: 373 - protein, 12 aa, synthetic construct
LNYSSRGDRQAL

SEQ ID NO: 374 - protein, 12 aa, synthetic construct
LNYSSRGDRQSL

SEQ ID NO: 375 - protein, 12 aa, synthetic construct
LNYSSRGDRQYL

SEQ ID NO: 376 - protein, 12 aa, synthetic construct
LNYSTRGDRASL

SEQ ID NO: 377 - protein, 12 aa, synthetic construct
LNYSTRGDRGAL

SEQ ID NO: 378 - protein, 12 aa, synthetic construct
LNYSTRGDRGSL

SEQ ID NO: 379 - protein, 12 aa, synthetic construct
LNYSTRGDRQAL

SEQ ID NO: 380 - protein, 12 aa, synthetic construct
LNYSTRGDRQSL

SEQ ID NO: 381 - protein, 12 aa, synthetic construct
LNYSTRGDRQYL

SEQ ID NO: 382 - protein, 12 aa, synthetic construct
LNYSVRGDRQAL

SEQ ID NO: 383 - protein, 12 aa, synthetic construct
LNYSVRGDRQSL

SEQ ID NO: 384 - protein, 12 aa, synthetic construct
MNASARGDRAAL

SEQ ID NO: 385 - protein, 12 aa, synthetic construct
MNASARGDRAYL

SEQ ID NO: 386 - protein, 12 aa, synthetic construct
MNASARGDRGSL

SEQ ID NO: 387 - protein, 12 aa, synthetic construct
MNASARGDRGYL

SEQ ID NO: 388 - protein, 12 aa, synthetic construct
MNASARGDRQAL

SEQ ID NO: 389 - protein, 12 aa, synthetic construct
MNASARGDRQSL

SEQ ID NO: 390 - protein, 12 aa, synthetic construct
MNASARGDRQYL

SEQ ID NO: 391 - protein, 12 aa, synthetic construct
MNASGRGDRAAL

SEQ ID NO: 392 - protein, 12 aa, synthetic construct
MNASGRGDRASL

SEQ ID NO: 393 - protein, 12 aa, synthetic construct
MNASGRGDRAYL

SEQ ID NO: 394 - protein, 12 aa, synthetic construct
MNASGRGDRGSL

SEQ ID NO: 395 - protein, 12 aa, synthetic construct
MNASGRGDRQAL

SEQ ID NO: 396 - protein, 12 aa, synthetic construct
MNASGRGDRQSL

SEQ ID NO: 397 - protein, 12 aa, synthetic construct
MNASGRGDRQYL

SEQ ID NO: 398 - protein, 12 aa, synthetic construct
MNASIRGDRQLL

SEQ ID NO: 399 - protein, 12 aa, synthetic construct
MNASMRGDRAAL

SEQ ID NO: 400 - protein, 12 aa, synthetic construct
MNASMRGDRAYL

SEQ ID NO: 401 - protein, 12 aa, synthetic construct
MNASMRGDRGAL

SEQ ID NO: 402 - protein, 12 aa, synthetic construct
MNASMRGDRQAL

SEQ ID NO: 403 - protein, 12 aa, synthetic construct
MNASMRGDRQSL

SEQ ID NO: 404 - protein, 12 aa, synthetic construct
MNASSRGDRAAL

SEQ ID NO: 405 - protein, 12 aa, synthetic construct
MNASTRGDRAAL

SEQ ID NO: 406 - protein, 12 aa, synthetic construct
MNASTRGDRASL

SEQ ID NO: 407 - protein, 12 aa, synthetic construct
MNASTRGDRAYL

SEQ ID NO: 408 - protein, 12 aa, synthetic construct
MNASTRGDRGAL

SEQ ID NO: 409 - protein, 12 aa, synthetic construct
MNASTRGDRGSL

SEQ ID NO: 410 - protein, 12 aa, synthetic construct
MNASTRGDRQAL

SEQ ID NO: 411 - protein, 12 aa, synthetic construct
MNASTRGDRQSL

SEQ ID NO: 412 - protein, 12 aa, synthetic construct
MNASTRGDRQYL

SEQ ID NO: 413 - protein, 12 aa, synthetic construct
MNASVRGDRAAL

SEQ ID NO: 414 - protein, 12 aa, synthetic construct
MNASVRGDRASL

SEQ ID NO: 415 - protein, 12 aa, synthetic construct
MNASVRGDRAYL

SEQ ID NO: 416 - protein, 12 aa, synthetic construct
MNASVRGDRQAL

SEQ ID NO: 417 - protein, 12 aa, synthetic construct
MNASVRGDRQSL

SEQ ID NO: 418 - protein, 12 aa, synthetic construct
MNASVRGDRQYL

SEQ ID NO: 419 - protein, 12 aa, synthetic construct
MNGNFRGDRQNL

SEQ ID NO: 420 - protein, 12 aa, synthetic construct
MNGSARGDRAYL

SEQ ID NO: 421 - protein, 12 aa, synthetic construct
MNGSARGDRGYL

SEQ ID NO: 422 - protein, 12 aa, synthetic construct
MNGSARGDRQAL

SEQ ID NO: 423 - protein, 12 aa, synthetic construct
MNGSARGDRQSL

SEQ ID NO: 424 - protein, 12 aa, synthetic construct
MNGSARGDRQYL

SEQ ID NO: 425 - protein, 12 aa, synthetic construct
MNGSGRGDRAAL

SEQ ID NO: 426 - protein, 12 aa, synthetic construct
MNGSGRGDRAYL

SEQ ID NO: 427 - protein, 12 aa, synthetic construct
MNGSGRGDRGAL

SEQ ID NO: 428 - protein, 12 aa, synthetic construct
MNGSGRGDRGSL

SEQ ID NO: 429 - protein, 12 aa, synthetic construct
MNGSGRGDRGYL

SEQ ID NO: 430 - protein, 12 aa, synthetic construct
MNGSGRGDRQAL

SEQ ID NO: 431 - protein, 12 aa, synthetic construct
MNGSGRGDRQSL

SEQ ID NO: 432 - protein, 12 aa, synthetic construct
MNGSGRGDRQYL

SEQ ID NO: 433 - protein, 12 aa, synthetic construct
MNGSMRGDRQAL

SEQ ID NO: 434 - protein, 12 aa, synthetic construct
MNGSMRGDRQSL

SEQ ID NO: 435 - protein, 12 aa, synthetic construct
MNGSMRGDRQYL

SEQ ID NO: 436 - protein, 12 aa, synthetic construct
MNGSSRGDRQYL

SEQ ID NO: 437 - protein, 12 aa, synthetic construct
MNGSTRGDRAYL

SEQ ID NO: 438 - protein, 12 aa, synthetic construct
MNGSTRGDRGAL

SEQ ID NO: 439 - protein, 12 aa, synthetic construct
MNGSTRGDRGYL

SEQ ID NO: 440 - protein, 12 aa, synthetic construct
MNGSTRGDRQAL

SEQ ID NO: 441 - protein, 12 aa, synthetic construct
MNGSTRGDRQSL

SEQ ID NO: 442 - protein, 12 aa, synthetic construct
MNGSTRGDRQYL

SEQ ID NO: 443 - protein, 12 aa, synthetic construct
MNGSVRGDRGYL

SEQ ID NO: 444 - protein, 12 aa, synthetic construct
MNGSVRGDRQAL

SEQ ID NO: 445 - protein, 12 aa, synthetic construct
MNGSVRGDRQYL

SEQ ID NO: 446 - protein, 12 aa, synthetic construct
MNSGMRGDRGAL

SEQ ID NO: 447 - protein, 12 aa, synthetic construct
MNSSARGDRAAL

SEQ ID NO: 448 - protein, 12 aa, synthetic construct
MNSSARGDRAYL

SEQ ID NO: 449 - protein, 12 aa, synthetic construct
MNSSARGDRGSL

SEQ ID NO: 450 - protein, 12 aa, synthetic construct
MNSSARGDRGYL

SEQ ID NO: 451 - protein, 12 aa, synthetic construct
MNSSARGDRQAL

SEQ ID NO: 452 - protein, 12 aa, synthetic construct
MNSSARGDRQSL

SEQ ID NO: 453 - protein, 12 aa, synthetic construct
MNSSARGDRQYL

SEQ ID NO: 454 - protein, 12 aa, synthetic construct
MNSSGRGDRAAL

SEQ ID NO: 455 - protein, 12 aa, synthetic construct
MNSSGRGDRASL

SEQ ID NO: 456 - protein, 12 aa, synthetic construct
MNSSGRGDRAYL

SEQ ID NO: 457 - protein, 12 aa, synthetic construct
MNSSGRGDRGAL

SEQ ID NO: 458 - protein, 12 aa, synthetic construct
MNSSGRGDRGSL

SEQ ID NO: 459 - protein, 12 aa, synthetic construct
MNSSGRGDRQAL

SEQ ID NO: 460 - protein, 12 aa, synthetic construct
MNSSGRGDRQSL

SEQ ID NO: 461 - protein, 12 aa, synthetic construct
MNSSGRGDRQYL

SEQ ID NO: 462 - protein, 12 aa, synthetic construct
MNSSMRGDRAAL

SEQ ID NO: 463 - protein, 12 aa, synthetic construct
MNSSMRGDRASL

SEQ ID NO: 464 - protein, 12 aa, synthetic construct
MNSSMRGDRAYL

SEQ ID NO: 465 - protein, 12 aa, synthetic construct
MNSSMRGDRGSL

SEQ ID NO: 466 - protein, 12 aa, synthetic construct
MNSSMRGDRQAL

SEQ ID NO: 467 - protein, 12 aa, synthetic construct
MNSSMRGDRQSL

SEQ ID NO: 468 - protein, 12 aa, synthetic construct
MNSSMRGDRQYL

SEQ ID NO: 469 - protein, 12 aa, synthetic construct
MNSSSRGDRAAL

SEQ ID NO: 470 - protein, 12 aa, synthetic construct
MNSSTRGDRAAL

SEQ ID NO: 471 - protein, 12 aa, synthetic construct
MNSSTRGDRASL

SEQ ID NO: 472 - protein, 12 aa, synthetic construct
MNSSTRGDRQAL

SEQ ID NO: 473 - protein, 12 aa, synthetic construct
MNSSTRGDRQSL

SEQ ID NO: 474 - protein, 12 aa, synthetic construct
MNSSTRGDRQYL

SEQ ID NO: 475 - protein, 12 aa, synthetic construct
MNSSVRGDRAAL

SEQ ID NO: 476 - protein, 12 aa, synthetic construct
MNSSVRGDRAYL

SEQ ID NO: 477 - protein, 12 aa, synthetic construct
MNSSVRGDRQAL

SEQ ID NO: 478 - protein, 12 aa, synthetic construct
MNSSVRGDRQSL

SEQ ID NO: 479 - protein, 12 aa, synthetic construct
MNSSVRGDRQYL

SEQ ID NO: 480 - protein, 12 aa, synthetic construct
MNTSARGDRAYL

SEQ ID NO: 481 - protein, 12 aa, synthetic construct
MNTSGRGDRAAL

SEQ ID NO: 482 - protein, 12 aa, synthetic construct
MNTSGRGDRQAL

SEQ ID NO: 483 - protein, 12 aa, synthetic construct
MNTSGRGDRQYL

SEQ ID NO: 484 - protein, 12 aa, synthetic construct
MNTSMRGDRAYL

SEQ ID NO: 485 - protein, 12 aa, synthetic construct
MNTSTRGDRQYL

SEQ ID NO: 486 - protein, 12 aa, synthetic construct
MNYPHRGDRGAL

SEQ ID NO: 487 - protein, 12 aa, synthetic construct
MNYSARGDRAAL

SEQ ID NO: 488 - protein, 12 aa, synthetic construct
MNYSARGDRGYL

SEQ ID NO: 489 - protein, 12 aa, synthetic construct
MNYSARGDRQAL

SEQ ID NO: 490 - protein, 12 aa, synthetic construct
MNYSARGDRQSL

SEQ ID NO: 491 - protein, 12 aa, synthetic construct
MNYSGRGDRAAL

SEQ ID NO: 492 - protein, 12 aa, synthetic construct
MNYSGRGDRASL

SEQ ID NO: 493 - protein, 12 aa, synthetic construct
MNYSGRGDRGSL

SEQ ID NO: 494 - protein, 12 aa, synthetic construct
MNYSGRGDRQAL

SEQ ID NO: 495 - protein, 12 aa, synthetic construct
MNYSGRGDRQSL

SEQ ID NO: 496 - protein, 12 aa, synthetic construct
MNYSSRGDRQAL

SEQ ID NO: 497 - protein, 12 aa, synthetic construct
MNYSTRGDRAAL

SEQ ID NO: 498 - protein, 12 aa, synthetic construct
MNYSTRGDRQAL

SEQ ID NO: 499 - protein, 12 aa, synthetic construct
MNYSTRGDRQSL

SEQ ID NO: 500 - protein, 12 aa, synthetic construct
MNYSTRGDRQYL

SEQ ID NO: 501 - protein, 12 aa, synthetic construct
NNSGMRGDRGAL

SEQ ID NO: 502 - protein, 12 aa, synthetic construct
QNSGMRGDRGAL

SEQ ID NO: 503 - protein, 12 aa, synthetic construct
SNASARGDRAAL

SEQ ID NO: 504 - protein, 12 aa, synthetic construct
SNASARGDRASL

SEQ ID NO: 505 - protein, 12 aa, synthetic construct
SNASARGDRAYL

SEQ ID NO: 506 - protein, 12 aa, synthetic construct
SNASARGDRGAL

SEQ ID NO: 507 - protein, 12 aa, synthetic construct
SNASARGDRGSL

SEQ ID NO: 508 - protein, 12 aa, synthetic construct
SNASARGDRGYL

SEQ ID NO: 509 - protein, 12 aa, synthetic construct
SNASARGDRQAL

SEQ ID NO: 510 - protein, 12 aa, synthetic construct
SNASARGDRQSL

SEQ ID NO: 511 - protein, 12 aa, synthetic construct
SNASARGDRQYL

SEQ ID NO: 512 - protein, 12 aa, synthetic construct
SNASGRGDRAAL

SEQ ID NO: 513 - protein, 12 aa, synthetic construct
SNASGRGDRASL

SEQ ID NO: 514 - protein, 12 aa, synthetic construct
SNASGRGDRAYL

SEQ ID NO: 515 - protein, 12 aa, synthetic construct
SNASGRGDRGAL

SEQ ID NO: 516 - protein, 12 aa, synthetic construct
SNASGRGDRGSL

SEQ ID NO: 517 - protein, 12 aa, synthetic construct
SNASGRGDRGYL

SEQ ID NO: 518 - protein, 12 aa, synthetic construct
SNASGRGDRQAL

SEQ ID NO: 519 - protein, 12 aa, synthetic construct
SNASGRGDRQSL

SEQ ID NO: 520 - protein, 12 aa, synthetic construct
SNASGRGDRQYL

SEQ ID NO: 521 - protein, 12 aa, synthetic construct
SNASIRGDRQLL

SEQ ID NO: 522 - protein, 12 aa, synthetic construct
SNASMRGDRAAL

SEQ ID NO: 523 - protein, 12 aa, synthetic construct
SNASMRGDRASL

SEQ ID NO: 524 - protein, 12 aa, synthetic construct
SNASMRGDRGAL

SEQ ID NO: 525 - protein, 12 aa, synthetic construct
SNASMRGDRGSL

SEQ ID NO: 526 - protein, 12 aa, synthetic construct
SNASMRGDRQAL

SEQ ID NO: 527 - protein, 12 aa, synthetic construct
SNASMRGDRQSL

SEQ ID NO: 528 - protein, 12 aa, synthetic construct
SNASSRGDRAAL

SEQ ID NO: 529 - protein, 12 aa, synthetic construct
SNASSRGDRASL

SEQ ID NO: 530 - protein, 12 aa, synthetic construct
SNASSRGDRAYL

SEQ ID NO: 531 - protein, 12 aa, synthetic construct
SNASSRGDRGAL

SEQ ID NO: 532 - protein, 12 aa, synthetic construct
SNASSRGDRGSL

SEQ ID NO: 533 - protein, 12 aa, synthetic construct
SNASSRGDRQAL

SEQ ID NO: 534 - protein, 12 aa, synthetic construct
SNASSRGDRQSL

SEQ ID NO: 535 - protein, 12 aa, synthetic construct
SNASSRGDRQYL

SEQ ID NO: 536 - protein, 12 aa, synthetic construct
SNASTRGDRAAL

SEQ ID NO: 537 - protein, 12 aa, synthetic construct
SNASTRGDRASL

SEQ ID NO: 538 - protein, 12 aa, synthetic construct
SNASTRGDRAYL

SEQ ID NO: 539 - protein, 12 aa, synthetic construct
SNASTRGDRGAL

SEQ ID NO: 540 - protein, 12 aa, synthetic construct
SNASTRGDRGSL

SEQ ID NO: 541 - protein, 12 aa, synthetic construct
SNASTRGDRGYL

SEQ ID NO: 542 - protein, 12 aa, synthetic construct
SNASTRGDRQAL

SEQ ID NO: 543 - protein, 12 aa, synthetic construct
SNASTRGDRQSL

SEQ ID NO: 544 - protein, 12 aa, synthetic construct
SNASTRGDRQYL

SEQ ID NO: 545 - protein, 12 aa, synthetic construct
SNASVRGDRAAL

SEQ ID NO: 546 - protein, 12 aa, synthetic construct
SNASVRGDRASL

SEQ ID NO: 547 - protein, 12 aa, synthetic construct
SNASVRGDRAYL

SEQ ID NO: 548 - protein, 12 aa, synthetic construct
SNASVRGDRGSL

SEQ ID NO: 549 - protein, 12 aa, synthetic construct
SNASVRGDRGYL

SEQ ID NO: 550 - protein, 12 aa, synthetic construct
SNASVRGDRQAL

SEQ ID NO: 551 - protein, 12 aa, synthetic construct
SNASVRGDRQSL

SEQ ID NO: 552 - protein, 12 aa, synthetic construct
SNASVRGDRQYL

SEQ ID NO: 553 - protein, 12 aa, synthetic construct
SNGNFRGDRQNL

SEQ ID NO: 554 - protein, 12 aa, synthetic construct
SNGNVRGDRGML

SEQ ID NO: 555 - protein, 12 aa, synthetic construct
SNGSARGDRGYL

SEQ ID NO: 556 - protein, 12 aa, synthetic construct
SNGSARGDRQAL

SEQ ID NO: 557 - protein, 12 aa, synthetic construct
SNGSARGDRQSL

SEQ ID NO: 558 - protein, 12 aa, synthetic construct
SNGSARGDRQYL

SEQ ID NO: 559 - protein, 12 aa, synthetic construct
SNGSGRGDRASL

SEQ ID NO: 560 - protein, 12 aa, synthetic construct
SNGSGRGDRAYL

SEQ ID NO: 561 - protein, 12 aa, synthetic construct
SNGSGRGDRGAL

SEQ ID NO: 562 - protein, 12 aa, synthetic construct
SNGSGRGDRGSL

SEQ ID NO: 563 - protein, 12 aa, synthetic construct
SNGSGRGDRGYL

SEQ ID NO: 564 - protein, 12 aa, synthetic construct
SNGSGRGDRQAL

SEQ ID NO: 565 - protein, 12 aa, synthetic construct
SNGSGRGDRQSL

SEQ ID NO: 566 - protein, 12 aa, synthetic construct
SNGSGRGDRQYL

SEQ ID NO: 567 - protein, 12 aa, synthetic construct
SNGSMRGDRAYL

SEQ ID NO: 568 - protein, 12 aa, synthetic construct
SNGSMRGDRGYL

SEQ ID NO: 569 - protein, 12 aa, synthetic construct
SNGSMRGDRQAL

SEQ ID NO: 570 - protein, 12 aa, synthetic construct
SNGSMRGDRQSL

SEQ ID NO: 571 - protein, 12 aa, synthetic construct
SNGSMRGDRQYL

SEQ ID NO: 572 - protein, 12 aa, synthetic construct
SNGSSRGDRGYL

SEQ ID NO: 573 - protein, 12 aa, synthetic construct
SNGSSRGDRQYL

SEQ ID NO: 574 - protein, 12 aa, synthetic construct
SNGSTRGDRAAL

SEQ ID NO: 575 - protein, 12 aa, synthetic construct
SNGSTRGDRASL

SEQ ID NO: 576 - protein, 12 aa, synthetic construct
SNGSTRGDRGAL

SEQ ID NO: 577 - protein, 12 aa, synthetic construct
SNGSTRGDRGYL

SEQ ID NO: 578 - protein, 12 aa, synthetic construct
SNGSTRGDRQAL

SEQ ID NO: 579 - protein, 12 aa, synthetic construct
SNGSTRGDRQSL

SEQ ID NO: 580 - protein, 12 aa, synthetic construct
SNGSTRGDRQYL

SEQ ID NO: 581 - protein, 12 aa, synthetic construct
SNGSVRGDRGYL

SEQ ID NO: 582 - protein, 12 aa, synthetic construct
SNGSVRGDRQAL

SEQ ID NO: 583 - protein, 12 aa, synthetic construct
SNGSVRGDRQSL

SEQ ID NO: 584 - protein, 12 aa, synthetic construct
SNGSVRGDRQYL

SEQ ID NO: 585 - protein, 12 aa, synthetic construct
SNSGMRGDRGAL

SEQ ID NO: 586 - protein, 12 aa, synthetic construct
SNSSARGDRAYL

SEQ ID NO: 587 - protein, 12 aa, synthetic construct
SNSSARGDRGAL

SEQ ID NO: 588 - protein, 12 aa, synthetic construct
SNSSARGDRGIL

SEQ ID NO: 589 - protein, 12 aa, synthetic construct
SNSSARGDRGSL

SEQ ID NO: 590 - protein, 12 aa, synthetic construct
SNSSARGDRGYL

SEQ ID NO: 591 - protein, 12 aa, synthetic construct
SNSSARGDRQAL

SEQ ID NO: 592 - protein, 12 aa, synthetic construct
SNSSARGDRQSL

SEQ ID NO: 593 - protein, 12 aa, synthetic construct
SNSSARGDRQYL

SEQ ID NO: 594 - protein, 12 aa, synthetic construct
SNSSGRGDRAAL

SEQ ID NO: 595 - protein, 12 aa, synthetic construct
SNSSGRGDRAYL

SEQ ID NO: 596 - protein, 12 aa, synthetic construct
SNSSGRGDRGAL

SEQ ID NO: 597 - protein, 12 aa, synthetic construct
SNSSGRGDRGSL

SEQ ID NO: 598 - protein, 12 aa, synthetic construct
SNSSGRGDRGYL

SEQ ID NO: 599 - protein, 12 aa, synthetic construct
SNSSGRGDRQAL

SEQ ID NO: 600 - protein, 12 aa, synthetic construct
SNSSGRGDRQSL

SEQ ID NO: 601 - protein, 12 aa, synthetic construct
SNSSGRGDRQYL

SEQ ID NO: 602 - protein, 12 aa, synthetic construct
SNSSMRGDRAAL

SEQ ID NO: 603 - protein, 12 aa, synthetic construct
SNSSMRGDRASL

SEQ ID NO: 604 - protein, 12 aa, synthetic construct
SNSSMRGDRAYL

SEQ ID NO: 605 - protein, 12 aa, synthetic construct
SNSSMRGDRGSL

SEQ ID NO: 606 - protein, 12 aa, synthetic construct
SNSSMRGDRQAL

SEQ ID NO: 607 - protein, 12 aa, synthetic construct
SNSSMRGDRQSL

SEQ ID NO: 608 - protein, 12 aa, synthetic construct
SNSSMRGDRQYL

SEQ ID NO: 609 - protein, 12 aa, synthetic construct
SNSSSRGDRAAL

SEQ ID NO: 610 - protein, 12 aa, synthetic construct
SNSSSRGDRGSL

SEQ ID NO: 611 - protein, 12 aa, synthetic construct
SNSSSRGDRQAL

SEQ ID NO: 612 - protein, 12 aa, synthetic construct
SNSSSRGDRQSL

SEQ ID NO: 613 - protein, 12 aa, synthetic construct
SNSSSRGDRQYL

SEQ ID NO: 614 - protein, 12 aa, synthetic construct
SNSSTRGDRAAL

SEQ ID NO: 615 - protein, 12 aa, synthetic construct
SNSSTRGDRASL

SEQ ID NO: 616 - protein, 12 aa, synthetic construct
SNSSTRGDRGSL

SEQ ID NO: 617 - protein, 12 aa, synthetic construct
SNSSTRGDRGYL

SEQ ID NO: 618 - protein, 12 aa, synthetic construct
SNSSTRGDRQAL

SEQ ID NO: 619 - protein, 12 aa, synthetic construct
SNSSTRGDRQSL

SEQ ID NO: 620 - protein, 12 aa, synthetic construct
SNSSTRGDRQYL

SEQ ID NO: 621 - protein, 12 aa, synthetic construct
SNSSVRGDRQAL

SEQ ID NO: 622 - protein, 12 aa, synthetic construct
SNSSVRGDRQSL

SEQ ID NO: 623 - protein, 12 aa, synthetic construct
SNSSVRGDRQYL

SEQ ID NO: 624 - protein, 12 aa, synthetic construct
SNTSARGDRAAL

SEQ ID NO: 625 - protein, 12 aa, synthetic construct
SNTSARGDRGAL

SEQ ID NO: 626 - protein, 12 aa, synthetic construct
SNTSARGDRGSL

SEQ ID NO: 627 - protein, 12 aa, synthetic construct
SNTSARGDRGYL

SEQ ID NO: 628 - protein, 12 aa, synthetic construct
SNTSARGDRQAL

SEQ ID NO: 629 - protein, 12 aa, synthetic construct
SNTSARGDRQSL

SEQ ID NO: 630 - protein, 12 aa, synthetic construct
SNTSARGDRQYL

SEQ ID NO: 631 - protein, 12 aa, synthetic construct
SNTSGRGDRAAL

SEQ ID NO: 632 - protein, 12 aa, synthetic construct
SNTSGRGDRASL

SEQ ID NO: 633 - protein, 12 aa, synthetic construct
SNTSGRGDRGAL

SEQ ID NO: 634 - protein, 12 aa, synthetic construct
SNTSGRGDRGSL

SEQ ID NO: 635 - protein, 12 aa, synthetic construct
SNTSGRGDRGYL

SEQ ID NO: 636 - protein, 12 aa, synthetic construct
SNTSGRGDRQAL

SEQ ID NO: 637 - protein, 12 aa, synthetic construct
SNTSGRGDRQSL

SEQ ID NO: 638 - protein, 12 aa, synthetic construct
SNTSGRGDRQYL

SEQ ID NO: 639 - protein, 12 aa, synthetic construct
SNTSMRGDRAYL

SEQ ID NO: 640 - protein, 12 aa, synthetic construct
SNTSMRGDRGSL

SEQ ID NO: 641 - protein, 12 aa, synthetic construct
SNTSMRGDRQAL

SEQ ID NO: 642 - protein, 12 aa, synthetic construct
SNTSMRGDRQSL

SEQ ID NO: 643 - protein, 12 aa, synthetic construct
SNTSSRGDRQAL

SEQ ID NO: 644 - protein, 12 aa, synthetic construct
SNTSTRGDRQAL

SEQ ID NO: 645 - protein, 12 aa, synthetic construct
SNTSTRGDRQSL

SEQ ID NO: 646 - protein, 12 aa, synthetic construct
SNTSTRGDRQYL

SEQ ID NO: 647 - protein, 12 aa, synthetic construct
SNTSVRGDRAYL

SEQ ID NO: 648 - protein, 12 aa, synthetic construct
SNTSVRGDRQAL

SEQ ID NO: 649 - protein, 12 aa, synthetic construct
SNTSVRGDRQSL

SEQ ID NO: 650 - protein, 12 aa, synthetic construct
SNTSVRGDRQYL

SEQ ID NO: 651 - protein, 12 aa, synthetic construct
SNYPHRGDRGAL

SEQ ID NO: 652 - protein, 12 aa, synthetic construct
SNYSARGDRAAL

SEQ ID NO: 653 - protein, 12 aa, synthetic construct
SNYSARGDRASL

SEQ ID NO: 654 - protein, 12 aa, synthetic construct
SNYSARGDRGAL

SEQ ID NO: 655 - protein, 12 aa, synthetic construct
SNYSARGDRGSL

SEQ ID NO: 656 - protein, 12 aa, synthetic construct
SNYSARGDRQAL

SEQ ID NO: 657 - protein, 12 aa, synthetic construct
SNYSARGDRQSL

SEQ ID NO: 658 - protein, 12 aa, synthetic construct
SNYSARGDRQYL

SEQ ID NO: 659 - protein, 12 aa, synthetic construct
SNYSGRGDRAAL

SEQ ID NO: 660 - protein, 12 aa, synthetic construct
SNYSGRGDRGAL

SEQ ID NO: 661 - protein, 12 aa, synthetic construct
SNYSGRGDRGSL

SEQ ID NO: 662 - protein, 12 aa, synthetic construct
SNYSGRGDRQAL

SEQ ID NO: 663 - protein, 12 aa, synthetic construct
SNYSGRGDRQSL

SEQ ID NO: 664 - protein, 12 aa, synthetic construct
SNYSMRGDRAAL

SEQ ID NO: 665 - protein, 12 aa, synthetic construct
SNYSMRGDRASL

SEQ ID NO: 666 - protein, 12 aa, synthetic construct
SNYSMRGDRGSL

SEQ ID NO: 667 - protein, 12 aa, synthetic construct
SNYSMRGDRQAL

SEQ ID NO: 668 - protein, 12 aa, synthetic construct
SNYSMRGDRQSL

SEQ ID NO: 669 - protein, 12 aa, synthetic construct
SNYSSRGDRGAL

SEQ ID NO: 670 - protein, 12 aa, synthetic construct
SNYSSRGDRGSL

SEQ ID NO: 671 - protein, 12 aa, synthetic construct
SNYSSRGDRQAL

SEQ ID NO: 672 - protein, 12 aa, synthetic construct
SNYSSRGDRQSL

SEQ ID NO: 673 - protein, 12 aa, synthetic construct
SNYSTRGDRAAL

SEQ ID NO: 674 - protein, 12 aa, synthetic construct
SNYSTRGDRGAL

SEQ ID NO: 675 - protein, 12 aa, synthetic construct
SNYSTRGDRGSL

SEQ ID NO: 676 - protein, 12 aa, synthetic construct
SNYSTRGDRQAL

SEQ ID NO: 677 - protein, 12 aa, synthetic construct
SNYSTRGDRQSL

SEQ ID NO: 678 - protein, 12 aa, synthetic construct
SNYSTRGDRQYL

SEQ ID NO: 679 - protein, 12 aa, synthetic construct
SNYSVRGDRQAL

SEQ ID NO: 680 - protein, 12 aa, synthetic construct
SNYSVRGDRQSL

SEQ ID NO: 681 - protein, 12 aa, synthetic construct
SNYSVRGDRQYL

SEQ ID NO: 682 - protein, 12 aa, synthetic construct
TNSGMRGDRGAL

SEQ ID NO: 683 - protein, 12 aa, synthetic construct
VNASARGDRAAL

SEQ ID NO: 684 - protein, 12 aa, synthetic construct
VNASARGDRGAL

SEQ ID NO: 685 - protein, 12 aa, synthetic construct
VNASARGDRGSL

SEQ ID NO: 686 - protein, 12 aa, synthetic construct
VNASARGDRGYL

SEQ ID NO: 687 - protein, 12 aa, synthetic construct
VNASARGDRQAL

SEQ ID NO: 688 - protein, 12 aa, synthetic construct
VNASARGDRQYL

SEQ ID NO: 689 - protein, 12 aa, synthetic construct
VNASGRGDRAAL

SEQ ID NO: 690 - protein, 12 aa, synthetic construct
VNASGRGDRAYL

SEQ ID NO: 691 - protein, 12 aa, synthetic construct
VNASGRGDRGAL

SEQ ID NO: 692 - protein, 12 aa, synthetic construct
VNASGRGDRGSL

SEQ ID NO: 693 - protein, 12 aa, synthetic construct
VNASGRGDRGYL

SEQ ID NO: 694 - protein, 12 aa, synthetic construct
VNASGRGDRQAL

SEQ ID NO: 695 - protein, 12 aa, synthetic construct
VNASGRGDRQYL

SEQ ID NO: 696 - protein, 12 aa, synthetic construct
VNASMRGDRAYL

SEQ ID NO: 697 - protein, 12 aa, synthetic construct
VNASMRGDRQAL

SEQ ID NO: 698 - protein, 12 aa, synthetic construct
VNASMRGDRQSL

SEQ ID NO: 699 - protein, 12 aa, synthetic construct
VNASSRGDRGSL

SEQ ID NO: 700 - protein, 12 aa, synthetic construct
VNASSRGDRQAL

SEQ ID NO: 701 - protein, 12 aa, synthetic construct
VNASSRGDRQYL

SEQ ID NO: 702 - protein, 12 aa, synthetic construct
VNASTRGDRAAL

SEQ ID NO: 703 - protein, 12 aa, synthetic construct
VNASTRGDRGAL

SEQ ID NO: 704 - protein, 12 aa, synthetic construct
VNASTRGDRGSL

SEQ ID NO: 705 - protein, 12 aa, synthetic construct
VNASTRGDRGYL

SEQ ID NO: 706 - protein, 12 aa, synthetic construct
VNASTRGDRQAL

SEQ ID NO: 707 - protein, 12 aa, synthetic construct
VNASTRGDRQSL

SEQ ID NO: 708 - protein, 12 aa, synthetic construct
VNASTRGDRQYL

SEQ ID NO: 709 - protein, 12 aa, synthetic construct
VNASVRGDRGSL

SEQ ID NO: 710 - protein, 12 aa, synthetic construct
VNASVRGDRGYL

SEQ ID NO: 711 - protein, 12 aa, synthetic construct
VNASVRGDRQAL

SEQ ID NO: 712 - protein, 12 aa, synthetic construct
VNASVRGDRQSL

SEQ ID NO: 713 - protein, 12 aa, synthetic construct
VNASVRGDRQYL

SEQ ID NO: 714 - protein, 12 aa, synthetic construct
VNGNFRGDRQNL

SEQ ID NO: 715 - protein, 12 aa, synthetic construct
VNGNVRGDRGML

SEQ ID NO: 716 - protein, 12 aa, synthetic construct
VNGSARGDRAYL

SEQ ID NO: 717 - protein, 12 aa, synthetic construct
VNGSARGDRGAL

SEQ ID NO: 718 - protein, 12 aa, synthetic construct
VNGSARGDRGSL

SEQ ID NO: 719 - protein, 12 aa, synthetic construct
VNGSARGDRGYL

SEQ ID NO: 720 - protein, 12 aa, synthetic construct
VNGSARGDRQAL

SEQ ID NO: 721 - protein, 12 aa, synthetic construct
VNGSARGDRQSL

SEQ ID NO: 722 - protein, 12 aa, synthetic construct
VNGSARGDRQYL

SEQ ID NO: 723 - protein, 12 aa, synthetic construct
VNGSGRGDRAAL

SEQ ID NO: 724 - protein, 12 aa, synthetic construct
VNGSGRGDRASL

SEQ ID NO: 725 - protein, 12 aa, synthetic construct
VNGSGRGDRAYL

SEQ ID NO: 726 - protein, 12 aa, synthetic construct
VNGSGRGDRGAL

SEQ ID NO: 727 - protein, 12 aa, synthetic construct
VNGSGRGDRGSL

SEQ ID NO: 728 - protein, 12 aa, synthetic construct
VNGSGRGDRGYL

SEQ ID NO: 729 - protein, 12 aa, synthetic construct
VNGSGRGDRQAL

SEQ ID NO: 730 - protein, 12 aa, synthetic construct
VNGSGRGDRQSL

SEQ ID NO: 731 - protein, 12 aa, synthetic construct
VNGSGRGDRQYL

SEQ ID NO: 732 - protein, 12 aa, synthetic construct
VNGSMRGDRGYL

SEQ ID NO: 733 - protein, 12 aa, synthetic construct
VNGSMRGDRQAL

SEQ ID NO: 734 - protein, 12 aa, synthetic construct
VNGSMRGDRQSL

SEQ ID NO: 735 - protein, 12 aa, synthetic construct
VNGSMRGDRQYL

SEQ ID NO: 736 - protein, 12 aa, synthetic construct
VNGSSRGDRAYL

SEQ ID NO: 737 - protein, 12 aa, synthetic construct
VNGSSRGDRGAL

SEQ ID NO: 738 - protein, 12 aa, synthetic construct
VNGSSRGDRGSL

SEQ ID NO: 739 - protein, 12 aa, synthetic construct
VNGSSRGDRQAL

SEQ ID NO: 740 - protein, 12 aa, synthetic construct
VNGSSRGDRQSL

SEQ ID NO: 741 - protein, 12 aa, synthetic construct
VNGSSRGDRQYL

SEQ ID NO: 742 - protein, 12 aa, synthetic construct
VNGSTRGDRAAL

SEQ ID NO: 743 - protein, 12 aa, synthetic construct
VNGSTRGDRAYL

SEQ ID NO: 744 - protein, 12 aa, synthetic construct
VNGSTRGDRGAL

SEQ ID NO: 745 - protein, 12 aa, synthetic construct
VNGSTRGDRGYL

SEQ ID NO: 746 - protein, 12 aa, synthetic construct
VNGSTRGDRQAL

SEQ ID NO: 747 - protein, 12 aa, synthetic construct
VNGSTRGDRQSL

SEQ ID NO: 748 - protein, 12 aa, synthetic construct
VNGSTRGDRQYL

SEQ ID NO: 749 - protein, 12 aa, synthetic construct
VNGSVRGDRAYL

SEQ ID NO: 750 - protein, 12 aa, synthetic construct
VNGSVRGDRQAL

SEQ ID NO: 751 - protein, 12 aa, synthetic construct
VNGSVRGDRQSL

SEQ ID NO: 752 - protein, 12 aa, synthetic construct
VNGSVRGDRQYL

SEQ ID NO: 753 - protein, 12 aa, synthetic construct
VNSGMRGDRGAL

SEQ ID NO: 754 - protein, 12 aa, synthetic construct
VNSSARGDRGAL

SEQ ID NO: 755 - protein, 12 aa, synthetic construct
VNSSARGDRGSL

SEQ ID NO: 756 - protein, 12 aa, synthetic construct
VNSSARGDRGYL

SEQ ID NO: 757 - protein, 12 aa, synthetic construct
VNSSARGDRQAL

SEQ ID NO: 758 - protein, 12 aa, synthetic construct
VNSSARGDRQSL

SEQ ID NO: 759 - protein, 12 aa, synthetic construct
VNSSARGDRQYL

SEQ ID NO: 760 - protein, 12 aa, synthetic construct
VNSSGRGDRAAL

SEQ ID NO: 761 - protein, 12 aa, synthetic construct
VNSSGRGDRAYL

SEQ ID NO: 762 - protein, 12 aa, synthetic construct
VNSSGRGDRGAL

SEQ ID NO: 763 - protein, 12 aa, synthetic construct
VNSSGRGDRQAL

SEQ ID NO: 764 - protein, 12 aa, synthetic construct
VNSSGRGDRQSL

SEQ ID NO: 765 - protein, 12 aa, synthetic construct
VNSSGRGDRQYL

SEQ ID NO: 766 - protein, 12 aa, synthetic construct
VNSSMRGDRAYL

SEQ ID NO: 767 - protein, 12 aa, synthetic construct
VNSSMRGDRQAL

SEQ ID NO: 768 - protein, 12 aa, synthetic construct
VNSSMRGDRQSL

SEQ ID NO: 769 - protein, 12 aa, synthetic construct
VNSSMRGDRQYL

SEQ ID NO: 770 - protein, 12 aa, synthetic construct
VNSSSRGDRGSL

SEQ ID NO: 771 - protein, 12 aa, synthetic construct
VNSSSRGDRQAL

SEQ ID NO: 772 - protein, 12 aa, synthetic construct
VNSSSRGDRQSL

SEQ ID NO: 773 - protein, 12 aa, synthetic construct
VNSSTRGDRGAL

SEQ ID NO: 774 - protein, 12 aa, synthetic construct
VNSSTRGDRQAL

SEQ ID NO: 775 - protein, 12 aa, synthetic construct
VNSSTRGDRQSL

SEQ ID NO: 776 - protein, 12 aa, synthetic construct
VNSSTRGDRQYL

SEQ ID NO: 777 - protein, 12 aa, synthetic construct
VNSSVRGDRAYL

SEQ ID NO: 778 - protein, 12 aa, synthetic construct
VNSSVRGDRQAL

SEQ ID NO: 779 - protein, 12 aa, synthetic construct
VNSSVRGDRQSL

SEQ ID NO: 780 - protein, 12 aa, synthetic construct
VNTSARGDRAYL

SEQ ID NO: 781 - protein, 12 aa, synthetic construct
VNTSGRGDRAAL

SEQ ID NO: 782 - protein, 12 aa, synthetic construct
VNTSGRGDRGAL

SEQ ID NO: 783 - protein, 12 aa, synthetic construct
VNTSGRGDRGSL

SEQ ID NO: 784 - protein, 12 aa, synthetic construct
VNTSGRGDRGYL

SEQ ID NO: 785 - protein, 12 aa, synthetic construct
VNTSGRGDRQAL

SEQ ID NO: 786 - protein, 12 aa, synthetic construct
VNTSGRGDRQSL

SEQ ID NO: 787 - protein, 12 aa, synthetic construct
VNTSGRGDRQYL

SEQ ID NO: 788 - protein, 12 aa, synthetic construct
VNTSTRGDRAYL

SEQ ID NO: 789 - protein, 12 aa, synthetic construct
VNYPHRGDRGAL

SEQ ID NO: 790 - protein, 12 aa, synthetic construct
VNYSARGDRGAL

SEQ ID NO: 791 - protein, 12 aa, synthetic construct
VNYSARGDRGSL

SEQ ID NO: 792 - protein, 12 aa, synthetic construct
VNYSARGDRQAL

SEQ ID NO: 793 - protein, 12 aa, synthetic construct
VNYSARGDRQSL

SEQ ID NO: 794 - protein, 12 aa, synthetic construct
VNYSGRGDRAAL

SEQ ID NO: 795 - protein, 12 aa, synthetic construct
VNYSGRGDRGAL

SEQ ID NO: 796 - protein, 12 aa, synthetic construct
VNYSGRGDRQAL

SEQ ID NO: 797 - protein, 12 aa, synthetic construct
VNYSGRGDRQSL

SEQ ID NO: 798 - protein, 12 aa, synthetic construct
VNYSGRGDRQYL

SEQ ID NO: 799 - protein, 12 aa, synthetic construct
VNYSSRGDRGSL

SEQ ID NO: 800 - protein, 12 aa, synthetic construct
VNYSSRGDRGYL

SEQ ID NO: 801 - protein, 5 aa, synthetic construct
ANASA

SEQ ID NO: 802 - protein, 5 aa, synthetic construct
ANASA

SEQ ID NO: 803 - protein, 5 aa, synthetic construct
ANASA

SEQ ID NO: 804 - protein, 5 aa, synthetic construct
ANASA

SEQ ID NO: 805 - protein, 5 aa, synthetic construct
ANASA

SEQ ID NO: 806 - protein, 5 aa, synthetic construct
ANASA

SEQ ID NO: 807 - protein, 5 aa, synthetic construct
ANASG

SEQ ID NO: 808 - protein, 5 aa, synthetic construct
ANASG

SEQ ID NO: 809 - protein, 5 aa, synthetic construct
ANASG

SEQ ID NO: 810 - protein, 5 aa, synthetic construct
ANASG

SEQ ID NO: 811 - protein, 5 aa, synthetic construct
ANASG

SEQ ID NO: 812 - protein, 5 aa, synthetic construct
ANASG

SEQ ID NO: 813 - protein, 5 aa, synthetic construct
ANASG

SEQ ID NO: 814 - protein, 5 aa, synthetic construct
ANASG

SEQ ID NO: 815 - protein, 5 aa, synthetic construct
ANASG

SEQ ID NO: 816 - protein, 5 aa, synthetic construct
ANASM

SEQ ID NO: 817 - protein, 5 aa, synthetic construct
ANASM

SEQ ID NO: 818 - protein, 5 aa, synthetic construct
ANASM

SEQ ID NO: 819 - protein, 5 aa, synthetic construct
ANASM

SEQ ID NO: 820 - protein, 5 aa, synthetic construct
ANASM

SEQ ID NO: 821 - protein, 5 aa, synthetic construct
ANASS

SEQ ID NO: 822 - protein, 5 aa, synthetic construct
ANASS

SEQ ID NO: 823 - protein, 5 aa, synthetic construct
ANASS

SEQ ID NO: 824 - protein, 5 aa, synthetic construct
ANASS

SEQ ID NO: 825 - protein, 5 aa, synthetic construct
ANASS

SEQ ID NO: 826 - protein, 5 aa, synthetic construct
ANAST

SEQ ID NO: 827 - protein, 5 aa, synthetic construct
ANAST

SEQ ID NO: 828 - protein, 5 aa, synthetic construct
ANAST

SEQ ID NO: 829 - protein, 5 aa, synthetic construct
ANAST

SEQ ID NO: 830 - protein, 5 aa, synthetic construct
ANAST

SEQ ID NO: 831 - protein, 5 aa, synthetic construct
ANAST

SEQ ID NO: 832 - protein, 5 aa, synthetic construct
ANAST

SEQ ID NO: 833 - protein, 5 aa, synthetic construct
ANAST

SEQ ID NO: 834 - protein, 5 aa, synthetic construct
ANASV

SEQ ID NO: 835 - protein, 5 aa, synthetic construct
ANASV

SEQ ID NO: 836 - protein, 5 aa, synthetic construct
ANASV

SEQ ID NO: 837 - protein, 5 aa, synthetic construct
ANASV

SEQ ID NO: 838 - protein, 5 aa, synthetic construct
ANASV

SEQ ID NO: 839 - protein, 5 aa, synthetic construct
ANGNF

SEQ ID NO: 840 - protein, 5 aa, synthetic construct
ANGNV

SEQ ID NO: 841 - protein, 5 aa, synthetic construct
ANGSA

SEQ ID NO: 842 - protein, 5 aa, synthetic construct
ANGSA

SEQ ID NO: 843 - protein, 5 aa, synthetic construct
ANGSA

SEQ ID NO: 844 - protein, 5 aa, synthetic construct
ANGSA

SEQ ID NO: 845 - protein, 5 aa, synthetic construct
ANGSA

SEQ ID NO: 846 - protein, 5 aa, synthetic construct
ANGSG

SEQ ID NO: 847 - protein, 5 aa, synthetic construct
ANGSG

SEQ ID NO: 848 - protein, 5 aa, synthetic construct
ANGSG

SEQ ID NO: 849 - protein, 5 aa, synthetic construct
ANGSG

SEQ ID NO: 850 - protein, 5 aa, synthetic construct
ANGSG

SEQ ID NO: 851 - protein, 5 aa, synthetic construct
ANGSG

SEQ ID NO: 852 - protein, 5 aa, synthetic construct
ANGSG

SEQ ID NO: 853 - protein, 5 aa, synthetic construct
ANGSG

SEQ ID NO: 854 - protein, 5 aa, synthetic construct
ANGSM

SEQ ID NO: 855 - protein, 5 aa, synthetic construct
ANGSM

SEQ ID NO: 856 - protein, 5 aa, synthetic construct
ANGSM

SEQ ID NO: 857 - protein, 5 aa, synthetic construct
ANGSM

SEQ ID NO: 858 - protein, 5 aa, synthetic construct
ANGSS

SEQ ID NO: 859 - protein, 5 aa, synthetic construct
ANGSS

SEQ ID NO: 860 - protein, 5 aa, synthetic construct
ANGSS

SEQ ID NO: 861 - protein, 5 aa, synthetic construct
ANGSS

SEQ ID NO: 862 - protein, 5 aa, synthetic construct
ANGSS

SEQ ID NO: 863 - protein, 5 aa, synthetic construct
ANGSS

SEQ ID NO: 864 - protein, 5 aa, synthetic construct
ANGST

SEQ ID NO: 865 - protein, 5 aa, synthetic construct
ANGST

SEQ ID NO: 866 - protein, 5 aa, synthetic construct
ANGST

SEQ ID NO: 867 - protein, 5 aa, synthetic construct
ANGST

SEQ ID NO: 868 - protein, 5 aa, synthetic construct
ANGST

SEQ ID NO: 869 - protein, 5 aa, synthetic construct
ANGST

SEQ ID NO: 870 - protein, 5 aa, synthetic construct
ANGST

SEQ ID NO: 871 - protein, 5 aa, synthetic construct
ANGSV

SEQ ID NO: 872 - protein, 5 aa, synthetic construct
ANGSV

SEQ ID NO: 873 - protein, 5 aa, synthetic construct
ANGSV

SEQ ID NO: 874 - protein, 5 aa, synthetic construct
ANGSV

SEQ ID NO: 875 - protein, 5 aa, synthetic construct
ANSGM

SEQ ID NO: 876 - protein, 5 aa, synthetic construct
ANSSA

SEQ ID NO: 877 - protein, 5 aa, synthetic construct
ANSSA

SEQ ID NO: 878 - protein, 5 aa, synthetic construct
ANSSA

SEQ ID NO: 879 - protein, 5 aa, synthetic construct
ANSSA

SEQ ID NO: 880 - protein, 5 aa, synthetic construct
ANSSA

SEQ ID NO: 881 - protein, 5 aa, synthetic construct
ANSSA

SEQ ID NO: 882 - protein, 5 aa, synthetic construct
ANSSG

SEQ ID NO: 883 - protein, 5 aa, synthetic construct
ANSSG

SEQ ID NO: 884 - protein, 5 aa, synthetic construct
ANSSG

SEQ ID NO: 885 - protein, 5 aa, synthetic construct
ANSSG

SEQ ID NO: 886 - protein, 5 aa, synthetic construct
ANSSG

SEQ ID NO: 887 - protein, 5 aa, synthetic construct
ANSSG

SEQ ID NO: 888 - protein, 5 aa, synthetic construct
ANSSG

SEQ ID NO: 889 - protein, 5 aa, synthetic construct
ANSSG

SEQ ID NO: 890 - protein, 5 aa, synthetic construct
ANSSG

SEQ ID NO: 891 - protein, 5 aa, synthetic construct
ANSSM

SEQ ID NO: 892 - protein, 5 aa, synthetic construct
ANSSM

SEQ ID NO: 893 - protein, 5 aa, synthetic construct
ANSSM

SEQ ID NO: 894 - protein, 5 aa, synthetic construct
ANSSM

SEQ ID NO: 895 - protein, 5 aa, synthetic construct
ANSSS

SEQ ID NO: 896 - protein, 5 aa, synthetic construct
ANSSS

SEQ ID NO: 897 - protein, 5 aa, synthetic construct
ANSSS

SEQ ID NO: 898 - protein, 5 aa, synthetic construct
ANSSS

SEQ ID NO: 899 - protein, 5 aa, synthetic construct
ANSSS

SEQ ID NO: 900 - protein, 5 aa, synthetic construct
ANSST

SEQ ID NO: 901 - protein, 5 aa, synthetic construct
ANSST

SEQ ID NO: 902 - protein, 5 aa, synthetic construct
ANSST

SEQ ID NO: 903 - protein, 5 aa, synthetic construct
ANSST

SEQ ID NO: 904 - protein, 5 aa, synthetic construct
ANSST

SEQ ID NO: 905 - protein, 5 aa, synthetic construct
ANSSV

SEQ ID NO: 906 - protein, 5 aa, synthetic construct
ANSSV

SEQ ID NO: 907 - protein, 5 aa, synthetic construct
ANSSV

SEQ ID NO: 908 - protein, 5 aa, synthetic construct
ANSSV

SEQ ID NO: 909 - protein, 5 aa, synthetic construct
ANSSV

SEQ ID NO: 910 - protein, 5 aa, synthetic construct
ANTSA

SEQ ID NO: 911 - protein, 5 aa, synthetic construct
ANTSA

SEQ ID NO: 912 - protein, 5 aa, synthetic construct
ANTSA

SEQ ID NO: 913 - protein, 5 aa, synthetic construct
ANTSA

SEQ ID NO: 914 - protein, 5 aa, synthetic construct
ANTSA

SEQ ID NO: 915 - protein, 5 aa, synthetic construct
ANTSA

SEQ ID NO: 916 - protein, 5 aa, synthetic construct
ANTSG

SEQ ID NO: 917 - protein, 5 aa, synthetic construct
ANTSG

SEQ ID NO: 918 - protein, 5 aa, synthetic construct
ANTSG

SEQ ID NO: 919 - protein, 5 aa, synthetic construct
ANTSG

SEQ ID NO: 920 - protein, 5 aa, synthetic construct
ANTSG

SEQ ID NO: 921 - protein, 5 aa, synthetic construct
ANTSG

SEQ ID NO: 922 - protein, 5 aa, synthetic construct
ANTSG

SEQ ID NO: 923 - protein, 5 aa, synthetic construct
ANTSM

SEQ ID NO: 924 - protein, 5 aa, synthetic construct
ANTSM

SEQ ID NO: 925 - protein, 5 aa, synthetic construct
ANTSM

SEQ ID NO: 926 - protein, 5 aa, synthetic construct
ANTSM

SEQ ID NO: 927 - protein, 5 aa, synthetic construct
ANTSS

SEQ ID NO: 928 - protein, 5 aa, synthetic construct
ANTSS

SEQ ID NO: 929 - protein, 5 aa, synthetic construct
ANTSS

SEQ ID NO: 930 - protein, 5 aa, synthetic construct
ANTST

SEQ ID NO: 931 - protein, 5 aa, synthetic construct
ANTST

SEQ ID NO: 932 - protein, 5 aa, synthetic construct
ANTST

SEQ ID NO: 933 - protein, 5 aa, synthetic construct
ANTST

SEQ ID NO: 934 - protein, 5 aa, synthetic construct
ANTSV

SEQ ID NO: 935 - protein, 5 aa, synthetic construct
ANTSV

SEQ ID NO: 936 - protein, 5 aa, synthetic construct
ANTSV

SEQ ID NO: 937 - protein, 5 aa, synthetic construct
ANTSV

SEQ ID NO: 938 - protein, 5 aa, synthetic construct
ANTSV

SEQ ID NO: 939 - protein, 5 aa, synthetic construct
ANYPH

SEQ ID NO: 940 - protein, 5 aa, synthetic construct
ANYSA

SEQ ID NO: 941 - protein, 5 aa, synthetic construct
ANYSA

SEQ ID NO: 942 - protein, 5 aa, synthetic construct
ANYSA

SEQ ID NO: 943 - protein, 5 aa, synthetic construct
ANYSA

SEQ ID NO: 944 - protein, 5 aa, synthetic construct
ANYSA

SEQ ID NO: 945 - protein, 5 aa, synthetic construct
ANYSA

SEQ ID NO: 946 - protein, 5 aa, synthetic construct
ANYSG

SEQ ID NO: 947 - protein, 5 aa, synthetic construct
ANYSG

SEQ ID NO: 948 - protein, 5 aa, synthetic construct
ANYSG

SEQ ID NO: 949 - protein, 5 aa, synthetic construct
ANYSG

SEQ ID NO: 950 - protein, 5 aa, synthetic construct
ANYSG

SEQ ID NO: 951 - protein, 5 aa, synthetic construct
ANYSG

SEQ ID NO: 952 - protein, 5 aa, synthetic construct
ANYSG

SEQ ID NO: 953 - protein, 5 aa, synthetic construct
ANYSM

SEQ ID NO: 954 - protein, 5 aa, synthetic construct
ANYSM

SEQ ID NO: 955 - protein, 5 aa, synthetic construct
ANYSM

SEQ ID NO: 956 - protein, 5 aa, synthetic construct
ANYSM

SEQ ID NO: 957 - protein, 5 aa, synthetic construct
ANYSM

SEQ ID NO: 958 - protein, 5 aa, synthetic construct
ANYSS

SEQ ID NO: 959 - protein, 5 aa, synthetic construct
ANYSS

SEQ ID NO: 960 - protein, 5 aa, synthetic construct
ANYSS

SEQ ID NO: 961 - protein, 5 aa, synthetic construct
ANYSS

SEQ ID NO: 962 - protein, 5 aa, synthetic construct
ANYSS

SEQ ID NO: 963 - protein, 5 aa, synthetic construct
ANYST

SEQ ID NO: 964 - protein, 5 aa, synthetic construct
ANYST

SEQ ID NO: 965 - protein, 5 aa, synthetic construct
ANYST

SEQ ID NO: 966 - protein, 5 aa, synthetic construct
ANYSV

SEQ ID NO: 967 - protein, 5 aa, synthetic construct
ANYSV

SEQ ID NO: 968 - protein, 5 aa, synthetic construct
ANYSV

SEQ ID NO: 969 - protein, 5 aa, synthetic construct
FNSGM

SEQ ID NO: 970 - protein, 5 aa, synthetic construct
GNSGM

SEQ ID NO: 971 - protein, 5 aa, synthetic construct
HNSGM

SEQ ID NO: 972 - protein, 5 aa, synthetic construct
LNASA

SEQ ID NO: 973 - protein, 5 aa, synthetic construct
LNASA

SEQ ID NO: 974 - protein, 5 aa, synthetic construct
LNASA

SEQ ID NO: 975 - protein, 5 aa, synthetic construct
LNASA

SEQ ID NO: 976 - protein, 5 aa, synthetic construct
LNASA

SEQ ID NO: 977 - protein, 5 aa, synthetic construct
LNASA

SEQ ID NO: 978 - protein, 5 aa, synthetic construct
LNASA

SEQ ID NO: 979 - protein, 5 aa, synthetic construct
LNASA

SEQ ID NO: 980 - protein, 5 aa, synthetic construct
LNASA

SEQ ID NO: 981 - protein, 5 aa, synthetic construct
LNASG

SEQ ID NO: 982 - protein, 5 aa, synthetic construct
LNASG

SEQ ID NO: 983 - protein, 5 aa, synthetic construct
LNASG

SEQ ID NO: 984 - protein, 5 aa, synthetic construct
LNASG

SEQ ID NO: 985 - protein, 5 aa, synthetic construct
LNASG

SEQ ID NO: 986 - protein, 5 aa, synthetic construct
LNASG

SEQ ID NO: 987 - protein, 5 aa, synthetic construct
LNASG

SEQ ID NO: 988 - protein, 5 aa, synthetic construct
LNASG

SEQ ID NO: 989 - protein, 5 aa, synthetic construct
LNASG

SEQ ID NO: 990 - protein, 5 aa, synthetic construct
LNASI

SEQ ID NO: 991 - protein, 5 aa, synthetic construct
LNASM

SEQ ID NO: 992 - protein, 5 aa, synthetic construct
LNASM

SEQ ID NO: 993 - protein, 5 aa, synthetic construct
LNASM

SEQ ID NO: 994 - protein, 5 aa, synthetic construct
LNASM

SEQ ID NO: 995 - protein, 5 aa, synthetic construct
LNASM

SEQ ID NO: 996 - protein, 5 aa, synthetic construct
LNASM

SEQ ID NO: 997 - protein, 5 aa, synthetic construct
LNASM

SEQ ID NO: 998 - protein, 5 aa, synthetic construct
LNASM

SEQ ID NO: 999 - protein, 5 aa, synthetic construct
LNASM

SEQ ID NO: 1000 - protein, 5 aa, synthetic construct
LNASS

SEQ ID NO: 1001 - protein, 5 aa, synthetic construct
LNASS

SEQ ID NO: 1002 - protein, 5 aa, synthetic construct
LNASS

SEQ ID NO: 1003 - protein, 5 aa, synthetic construct
LNASS

SEQ ID NO: 1004 - protein, 5 aa, synthetic construct
LNASS

SEQ ID NO: 1005 - protein, 5 aa, synthetic construct
LNASS

SEQ ID NO: 1006 - protein, 5 aa, synthetic construct
LNASS

SEQ ID NO: 1007 - protein, 5 aa, synthetic construct
LNAST

SEQ ID NO: 1008 - protein, 5 aa, synthetic construct
LNAST

SEQ ID NO: 1009 - protein, 5 aa, synthetic construct
LNAST

SEQ ID NO: 1010 - protein, 5 aa, synthetic construct
LNAST

SEQ ID NO: 1011 - protein, 5 aa, synthetic construct
LNAST

SEQ ID NO: 1012 - protein, 5 aa, synthetic construct
LNAST

SEQ ID NO: 1013 - protein, 5 aa, synthetic construct
LNAST

SEQ ID NO: 1014 - protein, 5 aa, synthetic construct
LNAST

SEQ ID NO: 1015 - protein, 5 aa, synthetic construct
LNASV

SEQ ID NO: 1016 - protein, 5 aa, synthetic construct
LNASV

SEQ ID NO: 1017 - protein, 5 aa, synthetic construct
LNASV

SEQ ID NO: 1018 - protein, 5 aa, synthetic construct
LNASV

SEQ ID NO: 1019 - protein, 5 aa, synthetic construct
LNASV

SEQ ID NO: 1020 - protein, 5 aa, synthetic construct
LNASV

SEQ ID NO: 1021 - protein, 5 aa, synthetic construct
LNASV

SEQ ID NO: 1022 - protein, 5 aa, synthetic construct
LNGNF

SEQ ID NO: 1023 - protein, 5 aa, synthetic construct
LNGNV

SEQ ID NO: 1024 - protein, 5 aa, synthetic construct
LNGSA

SEQ ID NO: 1025 - protein, 5 aa, synthetic construct
LNGSA

SEQ ID NO: 1026 - protein, 5 aa, synthetic construct
LNGSA

SEQ ID NO: 1027 - protein, 5 aa, synthetic construct
LNGSA

SEQ ID NO: 1028 - protein, 5 aa, synthetic construct
LNGSA

SEQ ID NO: 1029 - protein, 5 aa, synthetic construct
LNGSA

SEQ ID NO: 1030 - protein, 5 aa, synthetic construct
LNGSA

SEQ ID NO: 1031 - protein, 5 aa, synthetic construct
LNGSG

SEQ ID NO: 1032 - protein, 5 aa, synthetic construct
LNGSG

SEQ ID NO: 1033 - protein, 5 aa, synthetic construct
LNGSG

SEQ ID NO: 1034 - protein, 5 aa, synthetic construct
LNGSG

SEQ ID NO: 1035 - protein, 5 aa, synthetic construct
LNGSG

SEQ ID NO: 1036 - protein, 5 aa, synthetic construct
LNGSG

SEQ ID NO: 1037 - protein, 5 aa, synthetic construct
LNGSG

SEQ ID NO: 1038 - protein, 5 aa, synthetic construct
LNGSM

SEQ ID NO: 1039 - protein, 5 aa, synthetic construct
LNGSM

SEQ ID NO: 1040 - protein, 5 aa, synthetic construct
LNGSM

SEQ ID NO: 1041 - protein, 5 aa, synthetic construct
LNGSM

SEQ ID NO: 1042 - protein, 5 aa, synthetic construct
LNGSM

SEQ ID NO: 1043 - protein, 5 aa, synthetic construct
LNGSS

SEQ ID NO: 1044 - protein, 5 aa, synthetic construct
LNGSS

SEQ ID NO: 1045 - protein, 5 aa, synthetic construct
LNGSS

SEQ ID NO: 1046 - protein, 5 aa, synthetic construct
LNGSS

SEQ ID NO: 1047 - protein, 5 aa, synthetic construct
LNGST

SEQ ID NO: 1048 - protein, 5 aa, synthetic construct
LNGST

SEQ ID NO: 1049 - protein, 5 aa, synthetic construct
LNGST

SEQ ID NO: 1050 - protein, 5 aa, synthetic construct
LNGST

SEQ ID NO: 1051 - protein, 5 aa, synthetic construct
LNGST

SEQ ID NO: 1052 - protein, 5 aa, synthetic construct
LNGST

SEQ ID NO: 1053 - protein, 5 aa, synthetic construct
LNGST

SEQ ID NO: 1054 - protein, 5 aa, synthetic construct
LNGST

SEQ ID NO: 1055 - protein, 5 aa, synthetic construct
LNGST

SEQ ID NO: 1056 - protein, 5 aa, synthetic construct
LNGSV

SEQ ID NO: 1057 - protein, 5 aa, synthetic construct
LNGSV

SEQ ID NO: 1058 - protein, 5 aa, synthetic construct
LNGSV

SEQ ID NO: 1059 - protein, 5 aa, synthetic construct
LNGSV

SEQ ID NO: 1060 - protein, 5 aa, synthetic construct
LNGSV

SEQ ID NO: 1061 - protein, 5 aa, synthetic construct
LNGSV

SEQ ID NO: 1062 - protein, 5 aa, synthetic construct
LNSGM

SEQ ID NO: 1063 - protein, 5 aa, synthetic construct
LNSSA

SEQ ID NO: 1064 - protein, 5 aa, synthetic construct
LNSSA

SEQ ID NO: 1065 - protein, 5 aa, synthetic construct
LNSSA

SEQ ID NO: 1066 - protein, 5 aa, synthetic construct
LNSSA

SEQ ID NO: 1067 - protein, 5 aa, synthetic construct
LNSSA

SEQ ID NO: 1068 - protein, 5 aa, synthetic construct
LNSSA

SEQ ID NO: 1069 - protein, 5 aa, synthetic construct
LNSSA

SEQ ID NO: 1070 - protein, 5 aa, synthetic construct
LNSSA

SEQ ID NO: 1071 - protein, 5 aa, synthetic construct
LNSSA

SEQ ID NO: 1072 - protein, 5 aa, synthetic construct
LNSSG

SEQ ID NO: 1073 - protein, 5 aa, synthetic construct
LNSSG

SEQ ID NO: 1074 - protein, 5 aa, synthetic construct
LNSSG

SEQ ID NO: 1075 - protein, 5 aa, synthetic construct
LNSSG

SEQ ID NO: 1076 - protein, 5 aa, synthetic construct
LNSSG

SEQ ID NO: 1077 - protein, 5 aa, synthetic construct
LNSSG

SEQ ID NO: 1078 - protein, 5 aa, synthetic construct
LNSSG

SEQ ID NO: 1079 - protein, 5 aa, synthetic construct
LNSSG

SEQ ID NO: 1080 - protein, 5 aa, synthetic construct
LNSSG

SEQ ID NO: 1081 - protein, 5 aa, synthetic construct
LNSSM

SEQ ID NO: 1082 - protein, 5 aa, synthetic construct
LNSSM

SEQ ID NO: 1083 - protein, 5 aa, synthetic construct
LNSSM

SEQ ID NO: 1084 - protein, 5 aa, synthetic construct
LNSSM

SEQ ID NO: 1085 - protein, 5 aa, synthetic construct
LNSSM

SEQ ID NO: 1086 - protein, 5 aa, synthetic construct
LNSSM

SEQ ID NO: 1087 - protein, 5 aa, synthetic construct
LNSSM

SEQ ID NO: 1088 - protein, 5 aa, synthetic construct
LNSSM

SEQ ID NO: 1089 - protein, 5 aa, synthetic construct
LNSSS

SEQ ID NO: 1090 - protein, 5 aa, synthetic construct
LNSSS

SEQ ID NO: 1091 - protein, 5 aa, synthetic construct
LNSSS

SEQ ID NO: 1092 - protein, 5 aa, synthetic construct
LNSSS

SEQ ID NO: 1093 - protein, 5 aa, synthetic construct
LNSSS

SEQ ID NO: 1094 - protein, 5 aa, synthetic construct
LNSSS

SEQ ID NO: 1095 - protein, 5 aa, synthetic construct
LNSST

SEQ ID NO: 1096 - protein, 5 aa, synthetic construct
LNSST

SEQ ID NO: 1097 - protein, 5 aa, synthetic construct
LNSST

SEQ ID NO: 1098 - protein, 5 aa, synthetic construct
LNSST

SEQ ID NO: 1099 - protein, 5 aa, synthetic construct
LNSST

SEQ ID NO: 1100 - protein, 5 aa, synthetic construct
LNSST

SEQ ID NO: 1101 - protein, 5 aa, synthetic construct
LNSST

SEQ ID NO: 1102 - protein, 5 aa, synthetic construct
LNSSV

SEQ ID NO: 1103 - protein, 5 aa, synthetic construct
LNSSV

SEQ ID NO: 1104 - protein, 5 aa, synthetic construct
LNSSV

SEQ ID NO: 1105 - protein, 5 aa, synthetic construct
LNSSV

SEQ ID NO: 1106 - protein, 5 aa, synthetic construct
LNSSV

SEQ ID NO: 1107 - protein, 5 aa, synthetic construct
LNSSV

SEQ ID NO: 1108 - protein, 5 aa, synthetic construct
LNSSV

SEQ ID NO: 1109 - protein, 5 aa, synthetic construct
LNSSV

SEQ ID NO: 1110 - protein, 5 aa, synthetic construct
LNTSA

SEQ ID NO: 1111 - protein, 5 aa, synthetic construct
LNTSA

SEQ ID NO: 1112 - protein, 5 aa, synthetic construct
LNTSA

SEQ ID NO: 1113 - protein, 5 aa, synthetic construct
LNTSA

SEQ ID NO: 1114 - protein, 5 aa, synthetic construct
LNTSA

SEQ ID NO: 1115 - protein, 5 aa, synthetic construct
LNTSA

SEQ ID NO: 1116 - protein, 5 aa, synthetic construct
LNTSA

SEQ ID NO: 1117 - protein, 5 aa, synthetic construct
LNTSA

SEQ ID NO: 1118 - protein, 5 aa, synthetic construct
LNTSA

SEQ ID NO: 1119 - protein, 5 aa, synthetic construct
LNTSG

SEQ ID NO: 1120 - protein, 5 aa, synthetic construct
LNTSG

SEQ ID NO: 1121 - protein, 5 aa, synthetic construct
LNTSG

SEQ ID NO: 1122 - protein, 5 aa, synthetic construct
LNTSG

SEQ ID NO: 1123 - protein, 5 aa, synthetic construct
LNTSG

SEQ ID NO: 1124 - protein, 5 aa, synthetic construct
LNTSG

SEQ ID NO: 1125 - protein, 5 aa, synthetic construct
LNTSG

SEQ ID NO: 1126 - protein, 5 aa, synthetic construct
LNTSG

SEQ ID NO: 1127 - protein, 5 aa, synthetic construct
LNTSG

SEQ ID NO: 1128 - protein, 5 aa, synthetic construct
LNTSM

SEQ ID NO: 1129 - protein, 5 aa, synthetic construct
LNTSM

SEQ ID NO: 1130 - protein, 5 aa, synthetic construct
LNTSM

SEQ ID NO: 1131 - protein, 5 aa, synthetic construct
LNTSM

SEQ ID NO: 1132 - protein, 5 aa, synthetic construct
LNTSM

SEQ ID NO: 1133 - protein, 5 aa, synthetic construct
LNTSM

SEQ ID NO: 1134 - protein, 5 aa, synthetic construct
LNTSM

SEQ ID NO: 1135 - protein, 5 aa, synthetic construct
LNTSM

SEQ ID NO: 1136 - protein, 5 aa, synthetic construct
LNTSS

SEQ ID NO: 1137 - protein, 5 aa, synthetic construct
LNTSS

SEQ ID NO: 1138 - protein, 5 aa, synthetic construct
LNTSS

SEQ ID NO: 1139 - protein, 5 aa, synthetic construct
LNTSS

SEQ ID NO: 1140 - protein, 5 aa, synthetic construct
LNTSS

SEQ ID NO: 1141 - protein, 5 aa, synthetic construct
LNTST

SEQ ID NO: 1142 - protein, 5 aa, synthetic construct
LNTST

SEQ ID NO: 1143 - protein, 5 aa, synthetic construct
LNTST

SEQ ID NO: 1144 - protein, 5 aa, synthetic construct
LNTST

SEQ ID NO: 1145 - protein, 5 aa, synthetic construct
LNTST

SEQ ID NO: 1146 - protein, 5 aa, synthetic construct
LNTST

SEQ ID NO: 1147 - protein, 5 aa, synthetic construct
LNTST

SEQ ID NO: 1148 - protein, 5 aa, synthetic construct
LNTSV

SEQ ID NO: 1149 - protein, 5 aa, synthetic construct
LNTSV

SEQ ID NO: 1150 - protein, 5 aa, synthetic construct
LNTSV

SEQ ID NO: 1151 - protein, 5 aa, synthetic construct
LNTSV

SEQ ID NO: 1152 - protein, 5 aa, synthetic construct
LNTSV

SEQ ID NO: 1153 - protein, 5 aa, synthetic construct
LNTSV

SEQ ID NO: 1154 - protein, 5 aa, synthetic construct
LNTSV

SEQ ID NO: 1155 - protein, 5 aa, synthetic construct
LNYPH

SEQ ID NO: 1156 - protein, 5 aa, synthetic construct
LNYSA

SEQ ID NO: 1157 - protein, 5 aa, synthetic construct
LNYSA

SEQ ID NO: 1158 - protein, 5 aa, synthetic construct
LNYSA

SEQ ID NO: 1159 - protein, 5 aa, synthetic construct
LNYSA

SEQ ID NO: 1160 - protein, 5 aa, synthetic construct
LNYSA

SEQ ID NO: 1161 - protein, 5 aa, synthetic construct
LNYSG

SEQ ID NO: 1162 - protein, 5 aa, synthetic construct
LNYSG

SEQ ID NO: 1163 - protein, 5 aa, synthetic construct
LNYSG

SEQ ID NO: 1164 - protein, 5 aa, synthetic construct
LNYSG

SEQ ID NO: 1165 - protein, 5 aa, synthetic construct
LNYSG

SEQ ID NO: 1166 - protein, 5 aa, synthetic construct
LNYSG

SEQ ID NO: 1167 - protein, 5 aa, synthetic construct
LNYSG

SEQ ID NO: 1168 - protein, 5 aa, synthetic construct
LNYSM

SEQ ID NO: 1169 - protein, 5 aa, synthetic construct
LNYSM

SEQ ID NO: 1170 - protein, 5 aa, synthetic construct
LNYSS

SEQ ID NO: 1171 - protein, 5 aa, synthetic construct
LNYSS

SEQ ID NO: 1172 - protein, 5 aa, synthetic construct
LNYSS

SEQ ID NO: 1173 - protein, 5 aa, synthetic construct
LNYSS

SEQ ID NO: 1174 - protein, 5 aa, synthetic construct
LNYSS

SEQ ID NO: 1175 - protein, 5 aa, synthetic construct
LNYST

SEQ ID NO: 1176 - protein, 5 aa, synthetic construct
LNYST

SEQ ID NO: 1177 - protein, 5 aa, synthetic construct
LNYST

SEQ ID NO: 1178 - protein, 5 aa, synthetic construct
LNYST

SEQ ID NO: 1179 - protein, 5 aa, synthetic construct
LNYST

SEQ ID NO: 1180 - protein, 5 aa, synthetic construct
LNYST

SEQ ID NO: 1181 - protein, 5 aa, synthetic construct
LNYSV

SEQ ID NO: 1182 - protein, 5 aa, synthetic construct
LNYSV

SEQ ID NO: 1183 - protein, 5 aa, synthetic construct
MNASA

SEQ ID NO: 1184 - protein, 5 aa, synthetic construct
MNASA

SEQ ID NO: 1185 - protein, 5 aa, synthetic construct
MNASA

SEQ ID NO: 1186 - protein, 5 aa, synthetic construct
MNASA

SEQ ID NO: 1187 - protein, 5 aa, synthetic construct
MNASA

SEQ ID NO: 1188 - protein, 5 aa, synthetic construct
MNASA

SEQ ID NO: 1189 - protein, 5 aa, synthetic construct
MNASA

SEQ ID NO: 1190 - protein, 5 aa, synthetic construct
MNASG

SEQ ID NO: 1191 - protein, 5 aa, synthetic construct
MNASG

SEQ ID NO: 1192 - protein, 5 aa, synthetic construct
MNASG

SEQ ID NO: 1193 - protein, 5 aa, synthetic construct
MNASG

SEQ ID NO: 1194 - protein, 5 aa, synthetic construct
MNASG

SEQ ID NO: 1195 - protein, 5 aa, synthetic construct
MNASG

SEQ ID NO: 1196 - protein, 5 aa, synthetic construct
MNASG

SEQ ID NO: 1197 - protein, 5 aa, synthetic construct
MNASI

SEQ ID NO: 1198 - protein, 5 aa, synthetic construct
MNASM

SEQ ID NO: 1199 - protein, 5 aa, synthetic construct
MNASM

SEQ ID NO: 1200 - protein, 5 aa, synthetic construct
MNASM

SEQ ID NO: 1201 - protein, 5 aa, synthetic construct
MNASM

SEQ ID NO: 1202 - protein, 5 aa, synthetic construct
MNASM

SEQ ID NO: 1203 - protein, 5 aa, synthetic construct
MNASS

SEQ ID NO: 1204 - protein, 5 aa, synthetic construct
MNAST

SEQ ID NO: 1205 - protein, 5 aa, synthetic construct
MNAST

SEQ ID NO: 1206 - protein, 5 aa, synthetic construct
MNAST

SEQ ID NO: 1207 - protein, 5 aa, synthetic construct
MNAST

SEQ ID NO: 1208 - protein, 5 aa, synthetic construct
MNAST

SEQ ID NO: 1209 - protein, 5 aa, synthetic construct
MNAST

SEQ ID NO: 1210 - protein, 5 aa, synthetic construct
MNAST

SEQ ID NO: 1211 - protein, 5 aa, synthetic construct
MNAST

SEQ ID NO: 1212 - protein, 5 aa, synthetic construct
MNASV

SEQ ID NO: 1213 - protein, 5 aa, synthetic construct
MNASV

SEQ ID NO: 1214 - protein, 5 aa, synthetic construct
MNASV

SEQ ID NO: 1215 - protein, 5 aa, synthetic construct
MNASV

SEQ ID NO: 1216 - protein, 5 aa, synthetic construct
MNASV

SEQ ID NO: 1217 - protein, 5 aa, synthetic construct
MNASV

SEQ ID NO: 1218 - protein, 5 aa, synthetic construct
MNGNF

SEQ ID NO: 1219 - protein, 5 aa, synthetic construct
MNGSA

SEQ ID NO: 1220 - protein, 5 aa, synthetic construct
MNGSA

SEQ ID NO: 1221 - protein, 5 aa, synthetic construct
MNGSA

SEQ ID NO: 1222 - protein, 5 aa, synthetic construct
MNGSA

SEQ ID NO: 1223 - protein, 5 aa, synthetic construct
MNGSA

SEQ ID NO: 1224 - protein, 5 aa, synthetic construct
MNGSG

SEQ ID NO: 1225 - protein, 5 aa, synthetic construct
MNGSG

SEQ ID NO: 1226 - protein, 5 aa, synthetic construct
MNGSG

SEQ ID NO: 1227 - protein, 5 aa, synthetic construct
MNGSG

SEQ ID NO: 1228 - protein, 5 aa, synthetic construct
MNGSG

SEQ ID NO: 1229 - protein, 5 aa, synthetic construct
MNGSG

SEQ ID NO: 1230 - protein, 5 aa, synthetic construct
MNGSG

SEQ ID NO: 1231 - protein, 5 aa, synthetic construct
MNGSG

SEQ ID NO: 1232 - protein, 5 aa, synthetic construct
MNGSM

SEQ ID NO: 1233 - protein, 5 aa, synthetic construct
MNGSM

SEQ ID NO: 1234 - protein, 5 aa, synthetic construct
MNGSM

SEQ ID NO: 1235 - protein, 5 aa, synthetic construct
MNGSS

SEQ ID NO: 1236 - protein, 5 aa, synthetic construct
MNGST

SEQ ID NO: 1237 - protein, 5 aa, synthetic construct
MNGST

SEQ ID NO: 1238 - protein, 5 aa, synthetic construct
MNGST

SEQ ID NO: 1239 - protein, 5 aa, synthetic construct
MNGST

SEQ ID NO: 1240 - protein, 5 aa, synthetic construct
MNGST

SEQ ID NO: 1241 - protein, 5 aa, synthetic construct
MNGST

SEQ ID NO: 1242 - protein, 5 aa, synthetic construct
MNGSV

SEQ ID NO: 1243 - protein, 5 aa, synthetic construct
MNGSV

SEQ ID NO: 1244 - protein, 5 aa, synthetic construct
MNGSV

SEQ ID NO: 1245 - protein, 5 aa, synthetic construct
MNSGM

SEQ ID NO: 1246 - protein, 5 aa, synthetic construct
MNSSA

SEQ ID NO: 1247 - protein, 5 aa, synthetic construct
MNSSA

SEQ ID NO: 1248 - protein, 5 aa, synthetic construct
MNSSA

SEQ ID NO: 1249 - protein, 5 aa, synthetic construct
MNSSA

SEQ ID NO: 1250 - protein, 5 aa, synthetic construct
MNSSA

SEQ ID NO: 1251 - protein, 5 aa, synthetic construct
MNSSA

SEQ ID NO: 1252 - protein, 5 aa, synthetic construct
MNSSA

SEQ ID NO: 1253 - protein, 5 aa, synthetic construct
MNSSG

SEQ ID NO: 1254 - protein, 5 aa, synthetic construct
MNSSG

SEQ ID NO: 1255 - protein, 5 aa, synthetic construct
MNSSG

SEQ ID NO: 1256 - protein, 5 aa, synthetic construct
MNSSG

SEQ ID NO: 1257 - protein, 5 aa, synthetic construct
MNSSG

SEQ ID NO: 1258 - protein, 5 aa, synthetic construct
MNSSG

SEQ ID NO: 1259 - protein, 5 aa, synthetic construct
MNSSG

SEQ ID NO: 1260 - protein, 5 aa, synthetic construct
MNSSG

SEQ ID NO: 1261 - protein, 5 aa, synthetic construct
MNSSM

SEQ ID NO: 1262 - protein, 5 aa, synthetic construct
MNSSM

SEQ ID NO: 1263 - protein, 5 aa, synthetic construct
MNSSM

SEQ ID NO: 1264 - protein, 5 aa, synthetic construct
MNSSM

SEQ ID NO: 1265 - protein, 5 aa, synthetic construct
MNSSM

SEQ ID NO: 1266 - protein, 5 aa, synthetic construct
MNSSM

SEQ ID NO: 1267 - protein, 5 aa, synthetic construct
MNSSM

SEQ ID NO: 1268 - protein, 5 aa, synthetic construct
MNSSS

SEQ ID NO: 1269 - protein, 5 aa, synthetic construct
MNSST

SEQ ID NO: 1270 - protein, 5 aa, synthetic construct
MNSST

SEQ ID NO: 1271 - protein, 5 aa, synthetic construct
MNSST

SEQ ID NO: 1272 - protein, 5 aa, synthetic construct
MNSST

SEQ ID NO: 1273 - protein, 5 aa, synthetic construct
MNSST

SEQ ID NO: 1274 - protein, 5 aa, synthetic construct
MNSSV

SEQ ID NO: 1275 - protein, 5 aa, synthetic construct
MNSSV

SEQ ID NO: 1276 - protein, 5 aa, synthetic construct
MNSSV

SEQ ID NO: 1277 - protein, 5 aa, synthetic construct
MNSSV

SEQ ID NO: 1278 - protein, 5 aa, synthetic construct
MNSSV

SEQ ID NO: 1279 - protein, 5 aa, synthetic construct
MNTSA

SEQ ID NO: 1280 - protein, 5 aa, synthetic construct
MNTSG

SEQ ID NO: 1281 - protein, 5 aa, synthetic construct
MNTSG

SEQ ID NO: 1282 - protein, 5 aa, synthetic construct
MNTSG

SEQ ID NO: 1283 - protein, 5 aa, synthetic construct
MNTSM

SEQ ID NO: 1284 - protein, 5 aa, synthetic construct
MNTST

SEQ ID NO: 1285 - protein, 5 aa, synthetic construct
MNYPH

SEQ ID NO: 1286 - protein, 5 aa, synthetic construct
MNYSA

SEQ ID NO: 1287 - protein, 5 aa, synthetic construct
MNYSA

SEQ ID NO: 1288 - protein, 5 aa, synthetic construct
MNYSA

SEQ ID NO: 1289 - protein, 5 aa, synthetic construct
MNYSA

SEQ ID NO: 1290 - protein, 5 aa, synthetic construct
MNYSG

SEQ ID NO: 1291 - protein, 5 aa, synthetic construct
MNYSG

SEQ ID NO: 1292 - protein, 5 aa, synthetic construct
MNYSG

SEQ ID NO: 1293 - protein, 5 aa, synthetic construct
MNYSG

SEQ ID NO: 1294 - protein, 5 aa, synthetic construct
MNYSG

SEQ ID NO: 1295 - protein, 5 aa, synthetic construct
MNYSS

SEQ ID NO: 1296 - protein, 5 aa, synthetic construct
MNYST

SEQ ID NO: 1297 - protein, 5 aa, synthetic construct
MNYST

SEQ ID NO: 1298 - protein, 5 aa, synthetic construct
MNYST

SEQ ID NO: 1299 - protein, 5 aa, synthetic construct
MNYST

SEQ ID NO: 1300 - protein, 5 aa, synthetic construct
NNSGM

SEQ ID NO: 1301 - protein, 5 aa, synthetic construct
QNSGM

SEQ ID NO: 1302 - protein, 5 aa, synthetic construct
SNASA

SEQ ID NO: 1303 - protein, 5 aa, synthetic construct
SNASA

SEQ ID NO: 1304 - protein, 5 aa, synthetic construct
SNASA

SEQ ID NO: 1305 - protein, 5 aa, synthetic construct
SNASA

SEQ ID NO: 1306 - protein, 5 aa, synthetic construct
SNASA

SEQ ID NO: 1307 - protein, 5 aa, synthetic construct
SNASA

SEQ ID NO: 1308 - protein, 5 aa, synthetic construct
SNASA

SEQ ID NO: 1309 - protein, 5 aa, synthetic construct
SNASA

SEQ ID NO: 1310 - protein, 5 aa, synthetic construct
SNASA

SEQ ID NO: 1311 - protein, 5 aa, synthetic construct
SNASG

SEQ ID NO: 1312 - protein, 5 aa, synthetic construct
SNASG

SEQ ID NO: 1313 - protein, 5 aa, synthetic construct
SNASG

SEQ ID NO: 1314 - protein, 5 aa, synthetic construct
SNASG

SEQ ID NO: 1315 - protein, 5 aa, synthetic construct
SNASG

SEQ ID NO: 1316 - protein, 5 aa, synthetic construct
SNASG

SEQ ID NO: 1317 - protein, 5 aa, synthetic construct
SNASG

SEQ ID NO: 1318 - protein, 5 aa, synthetic construct
SNASG

SEQ ID NO: 1319 - protein, 5 aa, synthetic construct
SNASG

SEQ ID NO: 1320 - protein, 5 aa, synthetic construct
SNASI

SEQ ID NO: 1321 - protein, 5 aa, synthetic construct
SNASM

SEQ ID NO: 1322 - protein, 5 aa, synthetic construct
SNASM

SEQ ID NO: 1323 - protein, 5 aa, synthetic construct
SNASM

SEQ ID NO: 1324 - protein, 5 aa, synthetic construct
SNASM

SEQ ID NO: 1325 - protein, 5 aa, synthetic construct
SNASM

SEQ ID NO: 1326 - protein, 5 aa, synthetic construct
SNASM

SEQ ID NO: 1327 - protein, 5 aa, synthetic construct
SNASS

SEQ ID NO: 1328 - protein, 5 aa, synthetic construct
SNASS

SEQ ID NO: 1329 - protein, 5 aa, synthetic construct
SNASS

SEQ ID NO: 1330 - protein, 5 aa, synthetic construct
SNASS

SEQ ID NO: 1331 - protein, 5 aa, synthetic construct
SNASS

SEQ ID NO: 1332 - protein, 5 aa, synthetic construct
SNASS

SEQ ID NO: 1333 - protein, 5 aa, synthetic construct
SNASS

SEQ ID NO: 1334 - protein, 5 aa, synthetic construct
SNASS

SEQ ID NO: 1335 - protein, 5 aa, synthetic construct
SNAST

SEQ ID NO: 1336 - protein, 5 aa, synthetic construct
SNAST

SEQ ID NO: 1337 - protein, 5 aa, synthetic construct
SNAST

SEQ ID NO: 1338 - protein, 5 aa, synthetic construct
SNAST

SEQ ID NO: 1339 - protein, 5 aa, synthetic construct
SNAST

SEQ ID NO: 1340 - protein, 5 aa, synthetic construct
SNAST

SEQ ID NO: 1341 - protein, 5 aa, synthetic construct
SNAST

SEQ ID NO: 1342 - protein, 5 aa, synthetic construct
SNAST

SEQ ID NO: 1343 - protein, 5 aa, synthetic construct
SNAST

SEQ ID NO: 1344 - protein, 5 aa, synthetic construct
SNASV

SEQ ID NO: 1345 - protein, 5 aa, synthetic construct
SNASV

SEQ ID NO: 1346 - protein, 5 aa, synthetic construct
SNASV

SEQ ID NO: 1347 - protein, 5 aa, synthetic construct
SNASV

SEQ ID NO: 1348 - protein, 5 aa, synthetic construct
SNASV

SEQ ID NO: 1349 - protein, 5 aa, synthetic construct
SNASV

SEQ ID NO: 1350 - protein, 5 aa, synthetic construct
SNASV

SEQ ID NO: 1351 - protein, 5 aa, synthetic construct
SNASV

SEQ ID NO: 1352 - protein, 5 aa, synthetic construct
SNGNF

SEQ ID NO: 1353 - protein, 5 aa, synthetic construct
SNGNV

SEQ ID NO: 1354 - protein, 5 aa, synthetic construct
SNGSA

SEQ ID NO: 1355 - protein, 5 aa, synthetic construct
SNGSA

SEQ ID NO: 1356 - protein, 5 aa, synthetic construct
SNGSA

SEQ ID NO: 1357 - protein, 5 aa, synthetic construct
SNGSA

SEQ ID NO: 1358 - protein, 5 aa, synthetic construct
SNGSG

SEQ ID NO: 1359 - protein, 5 aa, synthetic construct
SNGSG

SEQ ID NO: 1360 - protein, 5 aa, synthetic construct
SNGSG

SEQ ID NO: 1361 - protein, 5 aa, synthetic construct
SNGSG

SEQ ID NO: 1362 - protein, 5 aa, synthetic construct
SNGSG

SEQ ID NO: 1363 - protein, 5 aa, synthetic construct
SNGSG

SEQ ID NO: 1364 - protein, 5 aa, synthetic construct
SNGSG

SEQ ID NO: 1365 - protein, 5 aa, synthetic construct
SNGSG

SEQ ID NO: 1366 - protein, 5 aa, synthetic construct
SNGSM

SEQ ID NO: 1367 - protein, 5 aa, synthetic construct
SNGSM

SEQ ID NO: 1368 - protein, 5 aa, synthetic construct
SNGSM

SEQ ID NO: 1369 - protein, 5 aa, synthetic construct
SNGSM

SEQ ID NO: 1370 - protein, 5 aa, synthetic construct
SNGSM

SEQ ID NO: 1371 - protein, 5 aa, synthetic construct
SNGSS

SEQ ID NO: 1372 - protein, 5 aa, synthetic construct
SNGSS

SEQ ID NO: 1373 - protein, 5 aa, synthetic construct
SNGST

SEQ ID NO: 1374 - protein, 5 aa, synthetic construct
SNGST

SEQ ID NO: 1375 - protein, 5 aa, synthetic construct
SNGST

SEQ ID NO: 1376 - protein, 5 aa, synthetic construct
SNGST

SEQ ID NO: 1377 - protein, 5 aa, synthetic construct
SNGST

SEQ ID NO: 1378 - protein, 5 aa, synthetic construct
SNGST

SEQ ID NO: 1379 - protein, 5 aa, synthetic construct
SNGST

SEQ ID NO: 1380 - protein, 5 aa, synthetic construct
SNGSV

SEQ ID NO: 1381 - protein, 5 aa, synthetic construct
SNGSV

SEQ ID NO: 1382 - protein, 5 aa, synthetic construct
SNGSV

SEQ ID NO: 1383 - protein, 5 aa, synthetic construct
SNGSV

SEQ ID NO: 1384 - protein, 5 aa, synthetic construct
SNSGM

SEQ ID NO: 1385 - protein, 5 aa, synthetic construct
SNSSA

SEQ ID NO: 1386 - protein, 5 aa, synthetic construct
SNSSA

SEQ ID NO: 1387 - protein, 5 aa, synthetic construct
SNSSA

SEQ ID NO: 1388 - protein, 5 aa, synthetic construct
SNSSA

SEQ ID NO: 1389 - protein, 5 aa, synthetic construct
SNSSA

SEQ ID NO: 1390 - protein, 5 aa, synthetic construct
SNSSA

SEQ ID NO: 1391 - protein, 5 aa, synthetic construct
SNSSA

SEQ ID NO: 1392 - protein, 5 aa, synthetic construct
SNSSA

SEQ ID NO: 1393 - protein, 5 aa, synthetic construct
SNSSG

SEQ ID NO: 1394 - protein, 5 aa, synthetic construct
SNSSG

SEQ ID NO: 1395 - protein, 5 aa, synthetic construct
SNSSG

SEQ ID NO: 1396 - protein, 5 aa, synthetic construct
SNSSG

SEQ ID NO: 1397 - protein, 5 aa, synthetic construct
SNSSG

SEQ ID NO: 1398 - protein, 5 aa, synthetic construct
SNSSG

SEQ ID NO: 1399 - protein, 5 aa, synthetic construct
SNSSG

SEQ ID NO: 1400 - protein, 5 aa, synthetic construct
SNSSG

SEQ ID NO: 1401 - protein, 5 aa, synthetic construct
SNSSM

SEQ ID NO: 1402 - protein, 5 aa, synthetic construct
SNSSM

SEQ ID NO: 1403 - protein, 5 aa, synthetic construct
SNSSM

SEQ ID NO: 1404 - protein, 5 aa, synthetic construct
SNSSM

SEQ ID NO: 1405 - protein, 5 aa, synthetic construct
SNSSM

SEQ ID NO: 1406 - protein, 5 aa, synthetic construct
SNSSM

SEQ ID NO: 1407 - protein, 5 aa, synthetic construct
SNSSM

SEQ ID NO: 1408 - protein, 5 aa, synthetic construct
SNSSS

SEQ ID NO: 1409 - protein, 5 aa, synthetic construct
SNSSS

SEQ ID NO: 1410 - protein, 5 aa, synthetic construct
SNSSS

SEQ ID NO: 1411 - protein, 5 aa, synthetic construct
SNSSS

SEQ ID NO: 1412 - protein, 5 aa, synthetic construct
SNSSS

SEQ ID NO: 1413 - protein, 5 aa, synthetic construct
SNSST

SEQ ID NO: 1414 - protein, 5 aa, synthetic construct
SNSST

SEQ ID NO: 1415 - protein, 5 aa, synthetic construct
SNSST

SEQ ID NO: 1416 - protein, 5 aa, synthetic construct
SNSST

SEQ ID NO: 1417 - protein, 5 aa, synthetic construct
SNSST

SEQ ID NO: 1418 - protein, 5 aa, synthetic construct
SNSST

SEQ ID NO: 1419 - protein, 5 aa, synthetic construct
SNSST

SEQ ID NO: 1420 - protein, 5 aa, synthetic construct
SNSSV

SEQ ID NO: 1421 - protein, 5 aa, synthetic construct
SNSSV

SEQ ID NO: 1422 - protein, 5 aa, synthetic construct
SNSSV

SEQ ID NO: 1423 - protein, 5 aa, synthetic construct
SNTSA

SEQ ID NO: 1424 - protein, 5 aa, synthetic construct
SNTSA

SEQ ID NO: 1425 - protein, 5 aa, synthetic construct
SNTSA

SEQ ID NO: 1426 - protein, 5 aa, synthetic construct
SNTSA

SEQ ID NO: 1427 - protein, 5 aa, synthetic construct
SNTSA

SEQ ID NO: 1428 - protein, 5 aa, synthetic construct
SNTSA

SEQ ID NO: 1429 - protein, 5 aa, synthetic construct
SNTSA

SEQ ID NO: 1430 - protein, 5 aa, synthetic construct
SNTSG

SEQ ID NO: 1431 - protein, 5 aa, synthetic construct
SNTSG

SEQ ID NO: 1432 - protein, 5 aa, synthetic construct
SNTSG

SEQ ID NO: 1433 - protein, 5 aa, synthetic construct
SNTSG

SEQ ID NO: 1434 - protein, 5 aa, synthetic construct
SNTSG

SEQ ID NO: 1435 - protein, 5 aa, synthetic construct
SNTSG

SEQ ID NO: 1436 - protein, 5 aa, synthetic construct
SNTSG

SEQ ID NO: 1437 - protein, 5 aa, synthetic construct
SNTSG

SEQ ID NO: 1438 - protein, 5 aa, synthetic construct
SNTSM

SEQ ID NO: 1439 - protein, 5 aa, synthetic construct
SNTSM

SEQ ID NO: 1440 - protein, 5 aa, synthetic construct
SNTSM

SEQ ID NO: 1441 - protein, 5 aa, synthetic construct
SNTSM

SEQ ID NO: 1442 - protein, 5 aa, synthetic construct
SNTSS

SEQ ID NO: 1443 - protein, 5 aa, synthetic construct
SNTST

SEQ ID NO: 1444 - protein, 5 aa, synthetic construct
SNTST

SEQ ID NO: 1445 - protein, 5 aa, synthetic construct
SNTST

SEQ ID NO: 1446 - protein, 5 aa, synthetic construct
SNTSV

SEQ ID NO: 1447 - protein, 5 aa, synthetic construct
SNTSV

SEQ ID NO: 1448 - protein, 5 aa, synthetic construct
SNTSV

SEQ ID NO: 1449 - protein, 5 aa, synthetic construct
SNTSV

SEQ ID NO: 1450 - protein, 5 aa, synthetic construct
SNYPH

SEQ ID NO: 1451 - protein, 5 aa, synthetic construct
SNYSA

SEQ ID NO: 1452 - protein, 5 aa, synthetic construct
SNYSA

SEQ ID NO: 1453 - protein, 5 aa, synthetic construct
SNYSA

SEQ ID NO: 1454 - protein, 5 aa, synthetic construct
SNYSA

SEQ ID NO: 1455 - protein, 5 aa, synthetic construct
SNYSA

SEQ ID NO: 1456 - protein, 5 aa, synthetic construct
SNYSA

SEQ ID NO: 1457 - protein, 5 aa, synthetic construct
SNYSA

SEQ ID NO: 1458 - protein, 5 aa, synthetic construct
SNYSG

SEQ ID NO: 1459 - protein, 5 aa, synthetic construct
SNYSG

SEQ ID NO: 1460 - protein, 5 aa, synthetic construct
SNYSG

SEQ ID NO: 1461 - protein, 5 aa, synthetic construct
SNYSG

SEQ ID NO: 1462 - protein, 5 aa, synthetic construct
SNYSG

SEQ ID NO: 1463 - protein, 5 aa, synthetic construct
SNYSM

SEQ ID NO: 1464 - protein, 5 aa, synthetic construct
SNYSM

SEQ ID NO: 1465 - protein, 5 aa, synthetic construct
SNYSM

SEQ ID NO: 1466 - protein, 5 aa, synthetic construct
SNYSM

SEQ ID NO: 1467 - protein, 5 aa, synthetic construct
SNYSM

SEQ ID NO: 1468 - protein, 5 aa, synthetic construct
SNYSS

SEQ ID NO: 1469 - protein, 5 aa, synthetic construct
SNYSS

SEQ ID NO: 1470 - protein, 5 aa, synthetic construct
SNYSS

SEQ ID NO: 1471 - protein, 5 aa, synthetic construct
SNYSS

SEQ ID NO: 1472 - protein, 5 aa, synthetic construct
SNYST

SEQ ID NO: 1473 - protein, 5 aa, synthetic construct
SNYST

SEQ ID NO: 1474 - protein, 5 aa, synthetic construct
SNYST

SEQ ID NO: 1475 - protein, 5 aa, synthetic construct
SNYST

SEQ ID NO: 1476 - protein, 5 aa, synthetic construct
SNYST

SEQ ID NO: 1477 - protein, 5 aa, synthetic construct
SNYST

SEQ ID NO: 1478 - protein, 5 aa, synthetic construct
SNYSV

SEQ ID NO: 1479 - protein, 5 aa, synthetic construct
SNYSV

SEQ ID NO: 1480 - protein, 5 aa, synthetic construct
SNYSV

SEQ ID NO: 1481 - protein, 5 aa, synthetic construct
TNSGM

SEQ ID NO: 1482 - protein, 5 aa, synthetic construct
VNASA

SEQ ID NO: 1483 - protein, 5 aa, synthetic construct
VNASA

SEQ ID NO: 1484 - protein, 5 aa, synthetic construct
VNASA

SEQ ID NO: 1485 - protein, 5 aa, synthetic construct
VNASA

SEQ ID NO: 1486 - protein, 5 aa, synthetic construct
VNASA

SEQ ID NO: 1487 - protein, 5 aa, synthetic construct
VNASA

SEQ ID NO: 1488 - protein, 5 aa, synthetic construct
VNASG

SEQ ID NO: 1489 - protein, 5 aa, synthetic construct
VNASG

SEQ ID NO: 1490 - protein, 5 aa, synthetic construct
VNASG

SEQ ID NO: 1491 - protein, 5 aa, synthetic construct
VNASG

SEQ ID NO: 1492 - protein, 5 aa, synthetic construct
VNASG

SEQ ID NO: 1493 - protein, 5 aa, synthetic construct
VNASG

SEQ ID NO: 1494 - protein, 5 aa, synthetic construct
VNASG

SEQ ID NO: 1495 - protein, 5 aa, synthetic construct
VNASM

SEQ ID NO: 1496 - protein, 5 aa, synthetic construct
VNASM

SEQ ID NO: 1497 - protein, 5 aa, synthetic construct
VNASM

SEQ ID NO: 1498 - protein, 5 aa, synthetic construct
VNASS

SEQ ID NO: 1499 - protein, 5 aa, synthetic construct
VNASS

SEQ ID NO: 1500 - protein, 5 aa, synthetic construct
VNASS

SEQ ID NO: 1501 - protein, 5 aa, synthetic construct
VNAST

SEQ ID NO: 1502 - protein, 5 aa, synthetic construct
VNAST

SEQ ID NO: 1503 - protein, 5 aa, synthetic construct
VNAST

SEQ ID NO: 1504 - protein, 5 aa, synthetic construct
VNAST

SEQ ID NO: 1505 - protein, 5 aa, synthetic construct
VNAST

SEQ ID NO: 1506 - protein, 5 aa, synthetic construct
VNAST

SEQ ID NO: 1507 - protein, 5 aa, synthetic construct
VNAST

SEQ ID NO: 1508 - protein, 5 aa, synthetic construct
VNASV

SEQ ID NO: 1509 - protein, 5 aa, synthetic construct
VNASV

SEQ ID NO: 1510 - protein, 5 aa, synthetic construct
VNASV

SEQ ID NO: 1511 - protein, 5 aa, synthetic construct
VNASV

SEQ ID NO: 1512 - protein, 5 aa, synthetic construct
VNASV

SEQ ID NO: 1513 - protein, 5 aa, synthetic construct
VNGNF

SEQ ID NO: 1514 - protein, 5 aa, synthetic construct
VNGNV

SEQ ID NO: 1515 - protein, 5 aa, synthetic construct
VNGSA

SEQ ID NO: 1516 - protein, 5 aa, synthetic construct
VNGSA

SEQ ID NO: 1517 - protein, 5 aa, synthetic construct
VNGSA

SEQ ID NO: 1518 - protein, 5 aa, synthetic construct
VNGSA

SEQ ID NO: 1519 - protein, 5 aa, synthetic construct
VNGSA

SEQ ID NO: 1520 - protein, 5 aa, synthetic construct
VNGSA

SEQ ID NO: 1521 - protein, 5 aa, synthetic construct
VNGSA

SEQ ID NO: 1522 - protein, 5 aa, synthetic construct
VNGSG

SEQ ID NO: 1523 - protein, 5 aa, synthetic construct
VNGSG

SEQ ID NO: 1524 - protein, 5 aa, synthetic construct
VNGSG

SEQ ID NO: 1525 - protein, 5 aa, synthetic construct
VNGSG

SEQ ID NO: 1526 - protein, 5 aa, synthetic construct
VNGSG

SEQ ID NO: 1527 - protein, 5 aa, synthetic construct
VNGSG

SEQ ID NO: 1528 - protein, 5 aa, synthetic construct
VNGSG

SEQ ID NO: 1529 - protein, 5 aa, synthetic construct
VNGSG

SEQ ID NO: 1530 - protein, 5 aa, synthetic construct
VNGSG

SEQ ID NO: 1531 - protein, 5 aa, synthetic construct
VNGSM

SEQ ID NO: 1532 - protein, 5 aa, synthetic construct
VNGSM

SEQ ID NO: 1533 - protein, 5 aa, synthetic construct
VNGSM

SEQ ID NO: 1534 - protein, 5 aa, synthetic construct
VNGSM

SEQ ID NO: 1535 - protein, 5 aa, synthetic construct
VNGSS

SEQ ID NO: 1536 - protein, 5 aa, synthetic construct
VNGSS

SEQ ID NO: 1537 - protein, 5 aa, synthetic construct
VNGSS

SEQ ID NO: 1538 - protein, 5 aa, synthetic construct
VNGSS

SEQ ID NO: 1539 - protein, 5 aa, synthetic construct
VNGSS

SEQ ID NO: 1540 - protein, 5 aa, synthetic construct
VNGSS

SEQ ID NO: 1541 - protein, 5 aa, synthetic construct
VNGST

SEQ ID NO: 1542 - protein, 5 aa, synthetic construct
VNGST

SEQ ID NO: 1543 - protein, 5 aa, synthetic construct
VNGST

SEQ ID NO: 1544 - protein, 5 aa, synthetic construct
VNGST

SEQ ID NO: 1545 - protein, 5 aa, synthetic construct
VNGST

SEQ ID NO: 1546 - protein, 5 aa, synthetic construct
VNGST

SEQ ID NO: 1547 - protein, 5 aa, synthetic construct
VNGST

SEQ ID NO: 1548 - protein, 5 aa, synthetic construct
VNGSV

SEQ ID NO: 1549 - protein, 5 aa, synthetic construct
VNGSV

SEQ ID NO: 1550 - protein, 5 aa, synthetic construct
VNGSV

SEQ ID NO: 1551 - protein, 5 aa, synthetic construct
VNGSV

SEQ ID NO: 1552 - protein, 5 aa, synthetic construct
VNSGM

SEQ ID NO: 1553 - protein, 5 aa, synthetic construct
VNSSA

SEQ ID NO: 1554 - protein, 5 aa, synthetic construct
VNSSA

SEQ ID NO: 1555 - protein, 5 aa, synthetic construct
VNSSA

SEQ ID NO: 1556 - protein, 5 aa, synthetic construct
VNSSA

SEQ ID NO: 1557 - protein, 5 aa, synthetic construct
VNSSA

SEQ ID NO: 1558 - protein, 5 aa, synthetic construct
VNSSA

SEQ ID NO: 1559 - protein, 5 aa, synthetic construct
VNSSG

SEQ ID NO: 1560 - protein, 5 aa, synthetic construct
VNSSG

SEQ ID NO: 1561 - protein, 5 aa, synthetic construct
VNSSG

SEQ ID NO: 1562 - protein, 5 aa, synthetic construct
VNSSG

SEQ ID NO: 1563 - protein, 5 aa, synthetic construct
VNSSG

SEQ ID NO: 1564 - protein, 5 aa, synthetic construct
VNSSG

SEQ ID NO: 1565 - protein, 5 aa, synthetic construct
VNSSM

SEQ ID NO: 1566 - protein, 5 aa, synthetic construct
VNSSM

SEQ ID NO: 1567 - protein, 5 aa, synthetic construct
VNSSM

SEQ ID NO: 1568 - protein, 5 aa, synthetic construct
VNSSM

SEQ ID NO: 1569 - protein, 5 aa, synthetic construct
VNSSS

SEQ ID NO: 1570 - protein, 5 aa, synthetic construct
VNSSS

SEQ ID NO: 1571 - protein, 5 aa, synthetic construct
VNSSS

SEQ ID NO: 1572 - protein, 5 aa, synthetic construct
VNSST

SEQ ID NO: 1573 - protein, 5 aa, synthetic construct
VNSST

SEQ ID NO: 1574 - protein, 5 aa, synthetic construct
VNSST

SEQ ID NO: 1575 - protein, 5 aa, synthetic construct
VNSST

SEQ ID NO: 1576 - protein, 5 aa, synthetic construct
VNSSV

SEQ ID NO: 1577 - protein, 5 aa, synthetic construct
VNSSV

SEQ ID NO: 1578 - protein, 5 aa, synthetic construct
VNSSV

SEQ ID NO: 1579 - protein, 5 aa, synthetic construct
VNTSA

SEQ ID NO: 1580 - protein, 5 aa, synthetic construct
VNTSG

SEQ ID NO: 1581 - protein, 5 aa, synthetic construct
VNTSG

SEQ ID NO: 1582 - protein, 5 aa, synthetic construct
VNTSG

SEQ ID NO: 1583 - protein, 5 aa, synthetic construct
VNTSG

SEQ ID NO: 1584 - protein, 5 aa, synthetic construct
VNTSG

SEQ ID NO: 1585 - protein, 5 aa, synthetic construct
VNTSG

SEQ ID NO: 1586 - protein, 5 aa, synthetic construct
VNTSG

SEQ ID NO: 1587 - protein, 5 aa, synthetic construct
VNTST

SEQ ID NO: 1588 - protein, 5 aa, synthetic construct
VNYPH

SEQ ID NO: 1589 - protein, 5 aa, synthetic construct
VNYSA

SEQ ID NO: 1590 - protein, 5 aa, synthetic construct
VNYSA

SEQ ID NO: 1591 - protein, 5 aa, synthetic construct
VNYSA

SEQ ID NO: 1592 - protein, 5 aa, synthetic construct
VNYSA

SEQ ID NO: 1593 - protein, 5 aa, synthetic construct
VNYSG

SEQ ID NO: 1594 - protein, 5 aa, synthetic construct
VNYSG

SEQ ID NO: 1595 - protein, 5 aa, synthetic construct
VNYSG

SEQ ID NO: 1596 - protein, 5 aa, synthetic construct
VNYSG

SEQ ID NO: 1597 - protein, 5 aa, synthetic construct
VNYSG

SEQ ID NO: 1598 - protein, 5 aa, synthetic construct
VNYSS

SEQ ID NO: 1599 - protein, 5 aa, synthetic construct
VNYSS

SEQ ID NO: 1600 - protein, 7 aa, synthetic construct
RGDRAAL

SEQ ID NO: 1601 - protein, 7 aa, synthetic construct
RGDRGSL

SEQ ID NO: 1602 - protein, 7 aa, synthetic construct
RGDRGYL

SEQ ID NO: 1603 - protein, 7 aa, synthetic construct
RGDRQAL

SEQ ID NO: 1604 - protein, 7 aa, synthetic construct
RGDRQSL

SEQ ID NO: 1605 - protein, 7 aa, synthetic construct
RGDRQYL

SEQ ID NO: 1606 - protein, 7 aa, synthetic construct
RGDRAAL

SEQ ID NO: 1607 - protein, 7 aa, synthetic construct
RGDRASL

SEQ ID NO: 1608 - protein, 7 aa, synthetic construct
RGDRAYL

SEQ ID NO: 1609 - protein, 7 aa, synthetic construct
RGDRGAL

SEQ ID NO: 1610 - protein, 7 aa, synthetic construct
RGDRGSL

SEQ ID NO: 1611 - protein, 7 aa, synthetic construct
RGDRGYL

SEQ ID NO: 1612 - protein, 7 aa, synthetic construct
RGDRQAL

SEQ ID NO: 1613 - protein, 7 aa, synthetic construct
RGDRQSL

SEQ ID NO: 1614 - protein, 7 aa, synthetic construct
RGDRQYL

SEQ ID NO: 1615 - protein, 7 aa, synthetic construct
RGDRAAL

SEQ ID NO: 1616 - protein, 7 aa, synthetic construct
RGDRASL

SEQ ID NO: 1617 - protein, 7 aa, synthetic construct
RGDRAYL

SEQ ID NO: 1618 - protein, 7 aa, synthetic construct
RGDRQAL

SEQ ID NO: 1619 - protein, 7 aa, synthetic construct
RGDRQSL

SEQ ID NO: 1620 - protein, 7 aa, synthetic construct
RGDRGSL

SEQ ID NO: 1621 - protein, 7 aa, synthetic construct
RGDRGYL

SEQ ID NO: 1622 - protein, 7 aa, synthetic construct
RGDRQAL

SEQ ID NO: 1623 - protein, 7 aa, synthetic construct
RGDRQSL

SEQ ID NO: 1624 - protein, 7 aa, synthetic construct
RGDRQYL

SEQ ID NO: 1625 - protein, 7 aa, synthetic construct
RGDRASL

SEQ ID NO: 1626 - protein, 7 aa, synthetic construct
RGDRAYL

SEQ ID NO: 1627 - protein, 7 aa, synthetic construct
RGDRGAL

SEQ ID NO: 1628 - protein, 7 aa, synthetic construct
RGDRGSL

SEQ ID NO: 1629 - protein, 7 aa, synthetic construct
RGDRGYL

SEQ ID NO: 1630 - protein, 7 aa, synthetic construct
RGDRQAL

SEQ ID NO: 1631 - protein, 7 aa, synthetic construct
RGDRQSL

SEQ ID NO: 1632 - protein, 7 aa, synthetic construct
RGDRQYL

SEQ ID NO: 1633 - protein, 7 aa, synthetic construct
RGDRASL

SEQ ID NO: 1634 - protein, 7 aa, synthetic construct
RGDRGYL

SEQ ID NO: 1635 - protein, 7 aa, synthetic construct
RGDRQAL

SEQ ID NO: 1636 - protein, 7 aa, synthetic construct
RGDRQSL

SEQ ID NO: 1637 - protein, 7 aa, synthetic construct
RGDRQYL

SEQ ID NO: 1638 - protein, 7 aa, synthetic construct
RGDRQNL

SEQ ID NO: 1639 - protein, 7 aa, synthetic construct
RGDRGML

SEQ ID NO: 1640 - protein, 7 aa, synthetic construct
RGDRAYL

SEQ ID NO: 1641 - protein, 7 aa, synthetic construct
RGDRGSL

SEQ ID NO: 1642 - protein, 7 aa, synthetic construct
RGDRGYL

SEQ ID NO: 1643 - protein, 7 aa, synthetic construct
RGDRQAL

SEQ ID NO: 1644 - protein, 7 aa, synthetic construct
RGDRQYL

SEQ ID NO: 1645 - protein, 7 aa, synthetic construct
RGDRAAL

SEQ ID NO: 1646 - protein, 7 aa, synthetic construct
RGDRAYL

SEQ ID NO: 1647 - protein, 7 aa, synthetic construct
RGDRGAL

SEQ ID NO: 1648 - protein, 7 aa, synthetic construct
RGDRGSL

SEQ ID NO: 1649 - protein, 7 aa, synthetic construct
RGDRGYL

SEQ ID NO: 1650 - protein, 7 aa, synthetic construct
RGDRQAL

SEQ ID NO: 1651 - protein, 7 aa, synthetic construct
RGDRQSL

SEQ ID NO: 1652 - protein, 7 aa, synthetic construct
RGDRQYL

SEQ ID NO: 1653 - protein, 7 aa, synthetic construct
RGDRGYL

SEQ ID NO: 1654 - protein, 7 aa, synthetic construct
RGDRQAL

SEQ ID NO: 1655 - protein, 7 aa, synthetic construct
RGDRQSL

SEQ ID NO: 1656 - protein, 7 aa, synthetic construct
RGDRQYL

SEQ ID NO: 1657 - protein, 7 aa, synthetic construct
RGDRAYL

SEQ ID NO: 1658 - protein, 7 aa, synthetic construct
RGDRGSL

SEQ ID NO: 1659 - protein, 7 aa, synthetic construct
RGDRGYL

SEQ ID NO: 1660 - protein, 7 aa, synthetic construct
RGDRQAL

SEQ ID NO: 1661 - protein, 7 aa, synthetic construct
RGDRQSL

SEQ ID NO: 1662 - protein, 7 aa, synthetic construct
RGDRQYL

SEQ ID NO: 1663 - protein, 7 aa, synthetic construct
RGDRAAL

SEQ ID NO: 1664 - protein, 7 aa, synthetic construct
RGDRAYL

SEQ ID NO: 1665 - protein, 7 aa, synthetic construct
RGDRGAL

SEQ ID NO: 1666 - protein, 7 aa, synthetic construct
RGDRGYL

SEQ ID NO: 1667 - protein, 7 aa, synthetic construct
RGDRQAL

SEQ ID NO: 1668 - protein, 7 aa, synthetic construct
RGDRQSL

SEQ ID NO: 1669 - protein, 7 aa, synthetic construct
RGDRQYL

SEQ ID NO: 1670 - protein, 7 aa, synthetic construct
RGDRAYL

SEQ ID NO: 1671 - protein, 7 aa, synthetic construct
RGDRGYL

SEQ ID NO: 1672 - protein, 7 aa, synthetic construct
RGDRQAL

SEQ ID NO: 1673 - protein, 7 aa, synthetic construct
RGDRQYL

SEQ ID NO: 1674 - protein, 7 aa, synthetic construct
RGDRGAL

SEQ ID NO: 1675 - protein, 7 aa, synthetic construct
RGDRGAL

SEQ ID NO: 1676 - protein, 7 aa, synthetic construct
RGDRGSL

SEQ ID NO: 1677 - protein, 7 aa, synthetic construct
RGDRGYL

SEQ ID NO: 1678 - protein, 7 aa, synthetic construct
RGDRQAL

SEQ ID NO: 1679 - protein, 7 aa, synthetic construct
RGDRQSL

SEQ ID NO: 1680 - protein, 7 aa, synthetic construct
RGDRQYL

SEQ ID NO: 1681 - protein, 7 aa, synthetic construct
RGDRAAL

SEQ ID NO: 1682 - protein, 7 aa, synthetic construct
RGDRASL

SEQ ID NO: 1683 - protein, 7 aa, synthetic construct
RGDRAYL

SEQ ID NO: 1684 - protein, 7 aa, synthetic construct
RGDRGAL

SEQ ID NO: 1685 - protein, 7 aa, synthetic construct
RGDRGSL

SEQ ID NO: 1686 - protein, 7 aa, synthetic construct
RGDRGYL

SEQ ID NO: 1687 - protein, 7 aa, synthetic construct
RGDRQAL

SEQ ID NO: 1688 - protein, 7 aa, synthetic construct
RGDRQSL

SEQ ID NO: 1689 - protein, 7 aa, synthetic construct
RGDRQYL

SEQ ID NO: 1690 - protein, 7 aa, synthetic construct
RGDRAYL

SEQ ID NO: 1691 - protein, 7 aa, synthetic construct
RGDRQAL

SEQ ID NO: 1692 - protein, 7 aa, synthetic construct
RGDRQSL

SEQ ID NO: 1693 - protein, 7 aa, synthetic construct
RGDRQYL

SEQ ID NO: 1694 - protein, 7 aa, synthetic construct
RGDRGSL

SEQ ID NO: 1695 - protein, 7 aa, synthetic construct
RGDRGYL

SEQ ID NO: 1696 - protein, 7 aa, synthetic construct
RGDRQAL

SEQ ID NO: 1697 - protein, 7 aa, synthetic construct
RGDRQSL

SEQ ID NO: 1698 - protein, 7 aa, synthetic construct
RGDRQYL

SEQ ID NO: 1699 - protein, 7 aa, synthetic construct
RGDRAAL

SEQ ID NO: 1700 - protein, 7 aa, synthetic construct
RGDRGSL

SEQ ID NO: 1701 - protein, 7 aa, synthetic construct
RGDRQAL

SEQ ID NO: 1702 - protein, 7 aa, synthetic construct
RGDRQSL

SEQ ID NO: 1703 - protein, 7 aa, synthetic construct
RGDRQYL

SEQ ID NO: 1704 - protein, 7 aa, synthetic construct
RGDRAYL

SEQ ID NO: 1705 - protein, 7 aa, synthetic construct
RGDRGYL

SEQ ID NO: 1706 - protein, 7 aa, synthetic construct
RGDRQAL

SEQ ID NO: 1707 - protein, 7 aa, synthetic construct
RGDRQSL

SEQ ID NO: 1708 - protein, 7 aa, synthetic construct
RGDRQYL

SEQ ID NO: 1709 - protein, 7 aa, synthetic construct
RGDRAYL

SEQ ID NO: 1710 - protein, 7 aa, synthetic construct
RGDRGAL

SEQ ID NO: 1711 - protein, 7 aa, synthetic construct
RGDRGSL

SEQ ID NO: 1712 - protein, 7 aa, synthetic construct
RGDRGYL

SEQ ID NO: 1713 - protein, 7 aa, synthetic construct
RGDRQAL

SEQ ID NO: 1714 - protein, 7 aa, synthetic construct
RGDRQYL

SEQ ID NO: 1715 - protein, 7 aa, synthetic construct
RGDRASL

SEQ ID NO: 1716 - protein, 7 aa, synthetic construct
RGDRGAL

SEQ ID NO: 1717 - protein, 7 aa, synthetic construct
RGDRGSL

SEQ ID NO: 1718 - protein, 7 aa, synthetic construct
RGDRGYL

SEQ ID NO: 1719 - protein, 7 aa, synthetic construct
RGDRQAL

SEQ ID NO: 1720 - protein, 7 aa, synthetic construct
RGDRQSL

SEQ ID NO: 1721 - protein, 7 aa, synthetic construct
RGDRQYL

SEQ ID NO: 1722 - protein, 7 aa, synthetic construct
RGDRAYL

SEQ ID NO: 1723 - protein, 7 aa, synthetic construct
RGDRQAL

SEQ ID NO: 1724 - protein, 7 aa, synthetic construct
RGDRQSL

SEQ ID NO: 1725 - protein, 7 aa, synthetic construct
RGDRQYL

SEQ ID NO: 1726 - protein, 7 aa, synthetic construct
RGDRGSL

SEQ ID NO: 1727 - protein, 7 aa, synthetic construct
RGDRQAL

SEQ ID NO: 1728 - protein, 7 aa, synthetic construct
RGDRQYL

SEQ ID NO: 1729 - protein, 7 aa, synthetic construct
RGDRAAL

SEQ ID NO: 1730 - protein, 7 aa, synthetic construct
RGDRQAL

SEQ ID NO: 1731 - protein, 7 aa, synthetic construct
RGDRQSL

SEQ ID NO: 1732 - protein, 7 aa, synthetic construct
RGDRQYL

SEQ ID NO: 1733 - protein, 7 aa, synthetic construct
RGDRAYL

SEQ ID NO: 1734 - protein, 7 aa, synthetic construct
RGDRGSL

SEQ ID NO: 1735 - protein, 7 aa, synthetic construct
RGDRQAL

SEQ ID NO: 1736 - protein, 7 aa, synthetic construct
RGDRQSL

SEQ ID NO: 1737 - protein, 7 aa, synthetic construct
RGDRQYL

SEQ ID NO: 1738 - protein, 7 aa, synthetic construct
RGDRGAL

SEQ ID NO: 1739 - protein, 7 aa, synthetic construct
RGDRAAL

SEQ ID NO: 1740 - protein, 7 aa, synthetic construct
RGDRASL

SEQ ID NO: 1741 - protein, 7 aa, synthetic construct
RGDRGAL

SEQ ID NO: 1742 - protein, 7 aa, synthetic construct
RGDRGSL

SEQ ID NO: 1743 - protein, 7 aa, synthetic construct
RGDRQAL

SEQ ID NO: 1744 - protein, 7 aa, synthetic construct
RGDRQSL

SEQ ID NO: 1745 - protein, 7 aa, synthetic construct
RGDRAAL

SEQ ID NO: 1746 - protein, 7 aa, synthetic construct
RGDRASL

SEQ ID NO: 1747 - protein, 7 aa, synthetic construct
RGDRGAL

SEQ ID NO: 1748 - protein, 7 aa, synthetic construct
RGDRGSL

SEQ ID NO: 1749 - protein, 7 aa, synthetic construct
RGDRQAL

SEQ ID NO: 1750 - protein, 7 aa, synthetic construct
RGDRQSL

SEQ ID NO: 1751 - protein, 7 aa, synthetic construct
RGDRQYL

SEQ ID NO: 1752 - protein, 7 aa, synthetic construct
RGDRAAL

SEQ ID NO: 1753 - protein, 7 aa, synthetic construct
RGDRASL

SEQ ID NO: 1754 - protein, 7 aa, synthetic construct
RGDRAYL

SEQ ID NO: 1755 - protein, 7 aa, synthetic construct
RGDRQAL

SEQ ID NO: 1756 - protein, 7 aa, synthetic construct
RGDRQSL

SEQ ID NO: 1757 - protein, 7 aa, synthetic construct
RGDRGAL

SEQ ID NO: 1758 - protein, 7 aa, synthetic construct
RGDRGSL

SEQ ID NO: 1759 - protein, 7 aa, synthetic construct
RGDRQAL

SEQ ID NO: 1760 - protein, 7 aa, synthetic construct
RGDRQSL

SEQ ID NO: 1761 - protein, 7 aa, synthetic construct
RGDRQYL

SEQ ID NO: 1762 - protein, 7 aa, synthetic construct
RGDRQAL

SEQ ID NO: 1763 - protein, 7 aa, synthetic construct
RGDRQSL

SEQ ID NO: 1764 - protein, 7 aa, synthetic construct
RGDRQYL

SEQ ID NO: 1765 - protein, 7 aa, synthetic construct
RGDRQAL

SEQ ID NO: 1766 - protein, 7 aa, synthetic construct
RGDRQSL

SEQ ID NO: 1767 - protein, 7 aa, synthetic construct
RGDRQYL

SEQ ID NO: 1768 - protein, 7 aa, synthetic construct
RGDRGAL

SEQ ID NO: 1769 - protein, 7 aa, synthetic construct
RGDRGAL

SEQ ID NO: 1770 - protein, 7 aa, synthetic construct
RGDRGAL

SEQ ID NO: 1771 - protein, 7 aa, synthetic construct
RGDRAAL

SEQ ID NO: 1772 - protein, 7 aa, synthetic construct
RGDRASL

SEQ ID NO: 1773 - protein, 7 aa, synthetic construct
RGDRAYL

SEQ ID NO: 1774 - protein, 7 aa, synthetic construct
RGDRGAL

SEQ ID NO: 1775 - protein, 7 aa, synthetic construct
RGDRGSL

SEQ ID NO: 1776 - protein, 7 aa, synthetic construct
RGDRGYL

SEQ ID NO: 1777 - protein, 7 aa, synthetic construct
RGDRQAL

SEQ ID NO: 1778 - protein, 7 aa, synthetic construct
RGDRQSL

SEQ ID NO: 1779 - protein, 7 aa, synthetic construct
RGDRQYL

SEQ ID NO: 1780 - protein, 7 aa, synthetic construct
RGDRAAL

SEQ ID NO: 1781 - protein, 7 aa, synthetic construct
RGDRASL

SEQ ID NO: 1782 - protein, 7 aa, synthetic construct
RGDRAYL

SEQ ID NO: 1783 - protein, 7 aa, synthetic construct
RGDRGAL

SEQ ID NO: 1784 - protein, 7 aa, synthetic construct
RGDRGSL

SEQ ID NO: 1785 - protein, 7 aa, synthetic construct
RGDRGYL

SEQ ID NO: 1786 - protein, 7 aa, synthetic construct
RGDRQAL

SEQ ID NO: 1787 - protein, 7 aa, synthetic construct
RGDRQSL

SEQ ID NO: 1788 - protein, 7 aa, synthetic construct
RGDRQYL

SEQ ID NO: 1789 - protein, 7 aa, synthetic construct
RGDRQLL

SEQ ID NO: 1790 - protein, 7 aa, synthetic construct
RGDRAAL

SEQ ID NO: 1791 - protein, 7 aa, synthetic construct
RGDRASL

SEQ ID NO: 1792 - protein, 7 aa, synthetic construct
RGDRAYL

SEQ ID NO: 1793 - protein, 7 aa, synthetic construct
RGDRGAL

SEQ ID NO: 1794 - protein, 7 aa, synthetic construct
RGDRGSL

SEQ ID NO: 1795 - protein, 7 aa, synthetic construct
RGDRGYL

SEQ ID NO: 1796 - protein, 7 aa, synthetic construct
RGDRQAL

SEQ ID NO: 1797 - protein, 7 aa, synthetic construct
RGDRQSL

SEQ ID NO: 1798 - protein, 7 aa, synthetic construct
RGDRQYL

SEQ ID NO: 1799 - protein, 7 aa, synthetic construct
RGDRAAL

SEQ ID NO: 1800 - protein, 7 aa, synthetic construct
RGDRASL

SEQ ID NO: 1801 - protein, 7 aa, synthetic construct
RGDRGAL

SEQ ID NO: 1802 - protein, 7 aa, synthetic construct
RGDRGSL

SEQ ID NO: 1803 - protein, 7 aa, synthetic construct
RGDRQAL

SEQ ID NO: 1804 - protein, 7 aa, synthetic construct
RGDRQSL

SEQ ID NO: 1805 - protein, 7 aa, synthetic construct
RGDRQYL

SEQ ID NO: 1806 - protein, 7 aa, synthetic construct
RGDRAAL

SEQ ID NO: 1807 - protein, 7 aa, synthetic construct
RGDRASL

SEQ ID NO: 1808 - protein, 7 aa, synthetic construct
RGDRGAL

SEQ ID NO: 1809 - protein, 7 aa, synthetic construct
RGDRGSL

SEQ ID NO: 1810 - protein, 7 aa, synthetic construct
RGDRGYL

SEQ ID NO: 1811 - protein, 7 aa, synthetic construct
RGDRQAL

SEQ ID NO: 1812 - protein, 7 aa, synthetic construct
RGDRQSL

SEQ ID NO: 1813 - protein, 7 aa, synthetic construct
RGDRQYL

SEQ ID NO: 1814 - protein, 7 aa, synthetic construct
RGDRAAL

SEQ ID NO: 1815 - protein, 7 aa, synthetic construct
RGDRASL

SEQ ID NO: 1816 - protein, 7 aa, synthetic construct
RGDRGAL

SEQ ID NO: 1817 - protein, 7 aa, synthetic construct
RGDRGSL

SEQ ID NO: 1818 - protein, 7 aa, synthetic construct
RGDRQAL

SEQ ID NO: 1819 - protein, 7 aa, synthetic construct
RGDRQSL

SEQ ID NO: 1820 - protein, 7 aa, synthetic construct
RGDRQYL

SEQ ID NO: 1821 - protein, 7 aa, synthetic construct
RGDRQNL

SEQ ID NO: 1822 - protein, 7 aa, synthetic construct
RGDRGML

SEQ ID NO: 1823 - protein, 7 aa, synthetic construct
RGDRAAL

SEQ ID NO: 1824 - protein, 7 aa, synthetic construct
RGDRAYL

SEQ ID NO: 1825 - protein, 7 aa, synthetic construct
RGDRGSL

SEQ ID NO: 1826 - protein, 7 aa, synthetic construct
RGDRGYL

SEQ ID NO: 1827 - protein, 7 aa, synthetic construct
RGDRQAL

SEQ ID NO: 1828 - protein, 7 aa, synthetic construct
RGDRQSL

SEQ ID NO: 1829 - protein, 7 aa, synthetic construct
RGDRQYL

SEQ ID NO: 1830 - protein, 7 aa, synthetic construct
RGDRAAL

SEQ ID NO: 1831 - protein, 7 aa, synthetic construct
RGDRAYL

SEQ ID NO: 1832 - protein, 7 aa, synthetic construct
RGDRGAL

SEQ ID NO: 1833 - protein, 7 aa, synthetic construct
RGDRGSL

SEQ ID NO: 1834 - protein, 7 aa, synthetic construct
RGDRGYL

SEQ ID NO: 1835 - protein, 7 aa, synthetic construct
RGDRQAL

SEQ ID NO: 1836 - protein, 7 aa, synthetic construct
RGDRQYL

SEQ ID NO: 1837 - protein, 7 aa, synthetic construct
RGDRASL

SEQ ID NO: 1838 - protein, 7 aa, synthetic construct
RGDRGYL

SEQ ID NO: 1839 - protein, 7 aa, synthetic construct
RGDRQAL

SEQ ID NO: 1840 - protein, 7 aa, synthetic construct
RGDRQSL

SEQ ID NO: 1841 - protein, 7 aa, synthetic construct
RGDRQYL

SEQ ID NO: 1842 - protein, 7 aa, synthetic construct
RGDRAAL

SEQ ID NO: 1843 - protein, 7 aa, synthetic construct
RGDRAYL

SEQ ID NO: 1844 - protein, 7 aa, synthetic construct
RGDRGAL

SEQ ID NO: 1845 - protein, 7 aa, synthetic construct
RGDRQYL

SEQ ID NO: 1846 - protein, 7 aa, synthetic construct
RGDRAAL

SEQ ID NO: 1847 - protein, 7 aa, synthetic construct
RGDRASL

SEQ ID NO: 1848 - protein, 7 aa, synthetic construct
RGDRAYL

SEQ ID NO: 1849 - protein, 7 aa, synthetic construct
RGDRGAL

SEQ ID NO: 1850 - protein, 7 aa, synthetic construct
RGDRGSL

SEQ ID NO: 1851 - protein, 7 aa, synthetic construct
RGDRGYL

SEQ ID NO: 1852 - protein, 7 aa, synthetic construct
RGDRQAL

SEQ ID NO: 1853 - protein, 7 aa, synthetic construct
RGDRQSL

SEQ ID NO: 1854 - protein, 7 aa, synthetic construct
RGDRQYL

SEQ ID NO: 1855 - protein, 7 aa, synthetic construct
RGDRASL

SEQ ID NO: 1856 - protein, 7 aa, synthetic construct
RGDRAYL

SEQ ID NO: 1857 - protein, 7 aa, synthetic construct
RGDRGYL

SEQ ID NO: 1858 - protein, 7 aa, synthetic construct
RGDRQAL

SEQ ID NO: 1859 - protein, 7 aa, synthetic construct
RGDRQSL

SEQ ID NO: 1860 - protein, 7 aa, synthetic construct
RGDRQYL

SEQ ID NO: 1861 - protein, 7 aa, synthetic construct
RGDRGAL

SEQ ID NO: 1862 - protein, 7 aa, synthetic construct
RGDRASL

SEQ ID NO: 1863 - protein, 7 aa, synthetic construct
RGDRAYL

SEQ ID NO: 1864 - protein, 7 aa, synthetic construct
RGDRGAL

SEQ ID NO: 1865 - protein, 7 aa, synthetic construct
RGDRGIL

SEQ ID NO: 1866 - protein, 7 aa, synthetic construct
RGDRGSL

SEQ ID NO: 1867 - protein, 7 aa, synthetic construct
RGDRGYL

SEQ ID NO: 1868 - protein, 7 aa, synthetic construct
RGDRQAL

SEQ ID NO: 1869 - protein, 7 aa, synthetic construct
RGDRQSL

SEQ ID NO: 1870 - protein, 7 aa, synthetic construct
RGDRQYL

SEQ ID NO: 1871 - protein, 7 aa, synthetic construct
RGDRAAL

SEQ ID NO: 1872 - protein, 7 aa, synthetic construct
RGDRASL

SEQ ID NO: 1873 - protein, 7 aa, synthetic construct
RGDRAYL

SEQ ID NO: 1874 - protein, 7 aa, synthetic construct
RGDRGAL

SEQ ID NO: 1875 - protein, 7 aa, synthetic construct
RGDRGSL

SEQ ID NO: 1876 - protein, 7 aa, synthetic construct
RGDRGYL

SEQ ID NO: 1877 - protein, 7 aa, synthetic construct
RGDRQAL

SEQ ID NO: 1878 - protein, 7 aa, synthetic construct
RGDRQSL

SEQ ID NO: 1879 - protein, 7 aa, synthetic construct
RGDRQYL

SEQ ID NO: 1880 - protein, 7 aa, synthetic construct
RGDRAAL

SEQ ID NO: 1881 - protein, 7 aa, synthetic construct
RGDRASL

SEQ ID NO: 1882 - protein, 7 aa, synthetic construct
RGDRAYL

SEQ ID NO: 1883 - protein, 7 aa, synthetic construct
RGDRGAL

SEQ ID NO: 1884 - protein, 7 aa, synthetic construct
RGDRGSL

SEQ ID NO: 1885 - protein, 7 aa, synthetic construct
RGDRQAL

SEQ ID NO: 1886 - protein, 7 aa, synthetic construct
RGDRQSL

SEQ ID NO: 1887 - protein, 7 aa, synthetic construct
RGDRQYL

SEQ ID NO: 1888 - protein, 7 aa, synthetic construct
RGDRAAL

SEQ ID NO: 1889 - protein, 7 aa, synthetic construct
RGDRGAL

SEQ ID NO: 1890 - protein, 7 aa, synthetic construct
RGDRGSL

SEQ ID NO: 1891 - protein, 7 aa, synthetic construct
RGDRQAL

SEQ ID NO: 1892 - protein, 7 aa, synthetic construct
RGDRQSL

SEQ ID NO: 1893 - protein, 7 aa, synthetic construct
RGDRQYL

SEQ ID NO: 1894 - protein, 7 aa, synthetic construct
RGDRAAL

SEQ ID NO: 1895 - protein, 7 aa, synthetic construct
RGDRASL

SEQ ID NO: 1896 - protein, 7 aa, synthetic construct
RGDRGAL

SEQ ID NO: 1897 - protein, 7 aa, synthetic construct
RGDRGSL

SEQ ID NO: 1898 - protein, 7 aa, synthetic construct
RGDRQAL

SEQ ID NO: 1899 - protein, 7 aa, synthetic construct
RGDRQSL

SEQ ID NO: 1900 - protein, 7 aa, synthetic construct
RGDRQYL

SEQ ID NO: 1901 - protein, 7 aa, synthetic construct
RGDRAAL

SEQ ID NO: 1902 - protein, 7 aa, synthetic construct
RGDRASL

SEQ ID NO: 1903 - protein, 7 aa, synthetic construct
RGDRGAL

SEQ ID NO: 1904 - protein, 7 aa, synthetic construct
RGDRGSL

SEQ ID NO: 1905 - protein, 7 aa, synthetic construct
RGDRGYL

SEQ ID NO: 1906 - protein, 7 aa, synthetic construct
RGDRQAL

SEQ ID NO: 1907 - protein, 7 aa, synthetic construct
RGDRQSL

SEQ ID NO: 1908 - protein, 7 aa, synthetic construct
RGDRQYL

SEQ ID NO: 1909 - protein, 7 aa, synthetic construct
RGDRAAL

SEQ ID NO: 1910 - protein, 7 aa, synthetic construct
RGDRASL

SEQ ID NO: 1911 - protein, 7 aa, synthetic construct
RGDRAYL

SEQ ID NO: 1912 - protein, 7 aa, synthetic construct
RGDRGAL

SEQ ID NO: 1913 - protein, 7 aa, synthetic construct
RGDRGSL

SEQ ID NO: 1914 - protein, 7 aa, synthetic construct
RGDRGYL

SEQ ID NO: 1915 - protein, 7 aa, synthetic construct
RGDRQAL

SEQ ID NO: 1916 - protein, 7 aa, synthetic construct
RGDRQSL

SEQ ID NO: 1917 - protein, 7 aa, synthetic construct
RGDRQYL

SEQ ID NO: 1918 - protein, 7 aa, synthetic construct
RGDRAAL

SEQ ID NO: 1919 - protein, 7 aa, synthetic construct
RGDRASL

SEQ ID NO: 1920 - protein, 7 aa, synthetic construct
RGDRAYL

SEQ ID NO: 1921 - protein, 7 aa, synthetic construct
RGDRGAL

SEQ ID NO: 1922 - protein, 7 aa, synthetic construct
RGDRGSL

SEQ ID NO: 1923 - protein, 7 aa, synthetic construct
RGDRGYL

SEQ ID NO: 1924 - protein, 7 aa, synthetic construct
RGDRQAL

SEQ ID NO: 1925 - protein, 7 aa, synthetic construct
RGDRQSL

SEQ ID NO: 1926 - protein, 7 aa, synthetic construct
RGDRQYL

SEQ ID NO: 1927 - protein, 7 aa, synthetic construct
RGDRAAL

SEQ ID NO: 1928 - protein, 7 aa, synthetic construct
RGDRASL

SEQ ID NO: 1929 - protein, 7 aa, synthetic construct
RGDRAYL

SEQ ID NO: 1930 - protein, 7 aa, synthetic construct
RGDRGAL

SEQ ID NO: 1931 - protein, 7 aa, synthetic construct
RGDRGSL

SEQ ID NO: 1932 - protein, 7 aa, synthetic construct
RGDRQAL

SEQ ID NO: 1933 - protein, 7 aa, synthetic construct
RGDRQSL

SEQ ID NO: 1934 - protein, 7 aa, synthetic construct
RGDRQYL

SEQ ID NO: 1935 - protein, 7 aa, synthetic construct
RGDRAAL

SEQ ID NO: 1936 - protein, 7 aa, synthetic construct
RGDRGSL

SEQ ID NO: 1937 - protein, 7 aa, synthetic construct
RGDRQAL

SEQ ID NO: 1938 - protein, 7 aa, synthetic construct
RGDRQSL

SEQ ID NO: 1939 - protein, 7 aa, synthetic construct
RGDRQYL

SEQ ID NO: 1940 - protein, 7 aa, synthetic construct
RGDRAAL

SEQ ID NO: 1941 - protein, 7 aa, synthetic construct
RGDRASL

SEQ ID NO: 1942 - protein, 7 aa, synthetic construct
RGDRGAL

SEQ ID NO: 1943 - protein, 7 aa, synthetic construct
RGDRGSL

SEQ ID NO: 1944 - protein, 7 aa, synthetic construct
RGDRQAL

SEQ ID NO: 1945 - protein, 7 aa, synthetic construct
RGDRQSL

SEQ ID NO: 1946 - protein, 7 aa, synthetic construct
RGDRQYL

SEQ ID NO: 1947 - protein, 7 aa, synthetic construct
RGDRAAL

SEQ ID NO: 1948 - protein, 7 aa, synthetic construct
RGDRASL

SEQ ID NO: 1949 - protein, 7 aa, synthetic construct
RGDRAYL

SEQ ID NO: 1950 - protein, 7 aa, synthetic construct
RGDRGAL

SEQ ID NO: 1951 - protein, 7 aa, synthetic construct
RGDRGSL

SEQ ID NO: 1952 - protein, 7 aa, synthetic construct
RGDRQAL

SEQ ID NO: 1953 - protein, 7 aa, synthetic construct
RGDRQSL

SEQ ID NO: 1954 - protein, 7 aa, synthetic construct
RGDRGAL

SEQ ID NO: 1955 - protein, 7 aa, synthetic construct
RGDRGAL

SEQ ID NO: 1956 - protein, 7 aa, synthetic construct
RGDRGSL

SEQ ID NO: 1957 - protein, 7 aa, synthetic construct
RGDRQAL

SEQ ID NO: 1958 - protein, 7 aa, synthetic construct
RGDRQSL

SEQ ID NO: 1959 - protein, 7 aa, synthetic construct
RGDRQYL

SEQ ID NO: 1960 - protein, 7 aa, synthetic construct
RGDRAAL

SEQ ID NO: 1961 - protein, 7 aa, synthetic construct
RGDRASL

SEQ ID NO: 1962 - protein, 7 aa, synthetic construct
RGDRGAL

SEQ ID NO: 1963 - protein, 7 aa, synthetic construct
RGDRGSL

SEQ ID NO: 1964 - protein, 7 aa, synthetic construct
RGDRQAL

SEQ ID NO: 1965 - protein, 7 aa, synthetic construct
RGDRQSL

SEQ ID NO: 1966 - protein, 7 aa, synthetic construct
RGDRQYL

SEQ ID NO: 1967 - protein, 7 aa, synthetic construct
RGDRQAL

SEQ ID NO: 1968 - protein, 7 aa, synthetic construct
RGDRQSL

SEQ ID NO: 1969 - protein, 7 aa, synthetic construct
RGDRGAL

SEQ ID NO: 1970 - protein, 7 aa, synthetic construct
RGDRGSL

SEQ ID NO: 1971 - protein, 7 aa, synthetic construct
RGDRQAL

SEQ ID NO: 1972 - protein, 7 aa, synthetic construct
RGDRQSL

SEQ ID NO: 1973 - protein, 7 aa, synthetic construct
RGDRQYL

SEQ ID NO: 1974 - protein, 7 aa, synthetic construct
RGDRASL

SEQ ID NO: 1975 - protein, 7 aa, synthetic construct
RGDRGAL

SEQ ID NO: 1976 - protein, 7 aa, synthetic construct
RGDRGSL

SEQ ID NO: 1977 - protein, 7 aa, synthetic construct
RGDRQAL

SEQ ID NO: 1978 - protein, 7 aa, synthetic construct
RGDRQSL

SEQ ID NO: 1979 - protein, 7 aa, synthetic construct
RGDRQYL

SEQ ID NO: 1980 - protein, 7 aa, synthetic construct
RGDRQAL

SEQ ID NO: 1981 - protein, 7 aa, synthetic construct
RGDRQSL

SEQ ID NO: 1982 - protein, 7 aa, synthetic construct
RGDRAAL

SEQ ID NO: 1983 - protein, 7 aa, synthetic construct
RGDRAYL

SEQ ID NO: 1984 - protein, 7 aa, synthetic construct
RGDRGSL

SEQ ID NO: 1985 - protein, 7 aa, synthetic construct
RGDRGYL

SEQ ID NO: 1986 - protein, 7 aa, synthetic construct
RGDRQAL

SEQ ID NO: 1987 - protein, 7 aa, synthetic construct
RGDRQSL

SEQ ID NO: 1988 - protein, 7 aa, synthetic construct
RGDRQYL

SEQ ID NO: 1989 - protein, 7 aa, synthetic construct
RGDRAAL

SEQ ID NO: 1990 - protein, 7 aa, synthetic construct
RGDRASL

SEQ ID NO: 1991 - protein, 7 aa, synthetic construct
RGDRAYL

SEQ ID NO: 1992 - protein, 7 aa, synthetic construct
RGDRGSL

SEQ ID NO: 1993 - protein, 7 aa, synthetic construct
RGDRQAL

SEQ ID NO: 1994 - protein, 7 aa, synthetic construct
RGDRQSL

SEQ ID NO: 1995 - protein, 7 aa, synthetic construct
RGDRQYL

SEQ ID NO: 1996 - protein, 7 aa, synthetic construct
RGDRQLL

SEQ ID NO: 1997 - protein, 7 aa, synthetic construct
RGDRAAL

SEQ ID NO: 1998 - protein, 7 aa, synthetic construct
RGDRAYL

SEQ ID NO: 1999 - protein, 7 aa, synthetic construct
RGDRGAL

SEQ ID NO: 2000 - protein, 7 aa, synthetic construct
RGDRQAL

SEQ ID NO: 2001 - protein, 7 aa, synthetic construct
RGDRQSL

SEQ ID NO: 2002 - protein, 7 aa, synthetic construct
RGDRAAL

SEQ ID NO: 2003 - protein, 7 aa, synthetic construct
RGDRAAL

SEQ ID NO: 2004 - protein, 7 aa, synthetic construct
RGDRASL

SEQ ID NO: 2005 - protein, 7 aa, synthetic construct
RGDRAYL

SEQ ID NO: 2006 - protein, 7 aa, synthetic construct
RGDRGAL

SEQ ID NO: 2007 - protein, 7 aa, synthetic construct
RGDRGSL

SEQ ID NO: 2008 - protein, 7 aa, synthetic construct
RGDRQAL

SEQ ID NO: 2009 - protein, 7 aa, synthetic construct
RGDRQSL

SEQ ID NO: 2010 - protein, 7 aa, synthetic construct
RGDRQYL

SEQ ID NO: 2011 - protein, 7 aa, synthetic construct
RGDRAAL

SEQ ID NO: 2012 - protein, 7 aa, synthetic construct
RGDRASL

SEQ ID NO: 2013 - protein, 7 aa, synthetic construct
RGDRAYL

SEQ ID NO: 2014 - protein, 7 aa, synthetic construct
RGDRQAL

SEQ ID NO: 2015 - protein, 7 aa, synthetic construct
RGDRQSL

SEQ ID NO: 2016 - protein, 7 aa, synthetic construct
RGDRQYL

SEQ ID NO: 2017 - protein, 7 aa, synthetic construct
RGDRQNL

SEQ ID NO: 2018 - protein, 7 aa, synthetic construct
RGDRAYL

SEQ ID NO: 2019 - protein, 7 aa, synthetic construct
RGDRGYL

SEQ ID NO: 2020 - protein, 7 aa, synthetic construct
RGDRQAL

SEQ ID NO: 2021 - protein, 7 aa, synthetic construct
RGDRQSL

SEQ ID NO: 2022 - protein, 7 aa, synthetic construct
RGDRQYL

SEQ ID NO: 2023 - protein, 7 aa, synthetic construct
RGDRAAL

SEQ ID NO: 2024 - protein, 7 aa, synthetic construct
RGDRAYL

SEQ ID NO: 2025 - protein, 7 aa, synthetic construct
RGDRGAL

SEQ ID NO: 2026 - protein, 7 aa, synthetic construct
RGDRGSL

SEQ ID NO: 2027 - protein, 7 aa, synthetic construct
RGDRGYL

SEQ ID NO: 2028 - protein, 7 aa, synthetic construct
RGDRQAL

SEQ ID NO: 2029 - protein, 7 aa, synthetic construct
RGDRQSL

SEQ ID NO: 2030 - protein, 7 aa, synthetic construct
RGDRQYL

SEQ ID NO: 2031 - protein, 7 aa, synthetic construct
RGDRQAL

SEQ ID NO: 2032 - protein, 7 aa, synthetic construct
RGDRQSL

SEQ ID NO: 2033 - protein, 7 aa, synthetic construct
RGDRQYL

SEQ ID NO: 2034 - protein, 7 aa, synthetic construct
RGDRQYL

SEQ ID NO: 2035 - protein, 7 aa, synthetic construct
RGDRAYL

SEQ ID NO: 2036 - protein, 7 aa, synthetic construct
RGDRGAL

SEQ ID NO: 2037 - protein, 7 aa, synthetic construct
RGDRGYL

SEQ ID NO: 2038 - protein, 7 aa, synthetic construct
RGDRQAL

SEQ ID NO: 2039 - protein, 7 aa, synthetic construct
RGDRQSL

SEQ ID NO: 2040 - protein, 7 aa, synthetic construct
RGDRQYL

SEQ ID NO: 2041 - protein, 7 aa, synthetic construct
RGDRGYL

SEQ ID NO: 2042 - protein, 7 aa, synthetic construct
RGDRQAL

SEQ ID NO: 2043 - protein, 7 aa, synthetic construct
RGDRQYL

SEQ ID NO: 2044 - protein, 7 aa, synthetic construct
RGDRGAL

SEQ ID NO: 2045 - protein, 7 aa, synthetic construct
RGDRAAL

SEQ ID NO: 2046 - protein, 7 aa, synthetic construct
RGDRAYL

SEQ ID NO: 2047 - protein, 7 aa, synthetic construct
RGDRGSL

SEQ ID NO: 2048 - protein, 7 aa, synthetic construct
RGDRGYL

SEQ ID NO: 2049 - protein, 7 aa, synthetic construct
RGDRQAL

SEQ ID NO: 2050 - protein, 7 aa, synthetic construct
RGDRQSL

SEQ ID NO: 2051 - protein, 7 aa, synthetic construct
RGDRQYL

SEQ ID NO: 2052 - protein, 7 aa, synthetic construct
RGDRAAL

SEQ ID NO: 2053 - protein, 7 aa, synthetic construct
RGDRASL

SEQ ID NO: 2054 - protein, 7 aa, synthetic construct
RGDRAYL

SEQ ID NO: 2055 - protein, 7 aa, synthetic construct
RGDRGAL

SEQ ID NO: 2056 - protein, 7 aa, synthetic construct
RGDRGSL

SEQ ID NO: 2057 - protein, 7 aa, synthetic construct
RGDRQAL

SEQ ID NO: 2058 - protein, 7 aa, synthetic construct
RGDRQSL

SEQ ID NO: 2059 - protein, 7 aa, synthetic construct
RGDRQYL

SEQ ID NO: 2060 - protein, 7 aa, synthetic construct
RGDRAAL

SEQ ID NO: 2061 - protein, 7 aa, synthetic construct
RGDRASL

SEQ ID NO: 2062 - protein, 7 aa, synthetic construct
RGDRAYL

SEQ ID NO: 2063 - protein, 7 aa, synthetic construct
RGDRGSL

SEQ ID NO: 2064 - protein, 7 aa, synthetic construct
RGDRQAL

SEQ ID NO: 2065 - protein, 7 aa, synthetic construct
RGDRQSL

SEQ ID NO: 2066 - protein, 7 aa, synthetic construct
RGDRQYL

SEQ ID NO: 2067 - protein, 7 aa, synthetic construct
RGDRAAL

SEQ ID NO: 2068 - protein, 7 aa, synthetic construct
RGDRAAL

SEQ ID NO: 2069 - protein, 7 aa, synthetic construct
RGDRASL

SEQ ID NO: 2070 - protein, 7 aa, synthetic construct
RGDRQAL

SEQ ID NO: 2071 - protein, 7 aa, synthetic construct
RGDRQSL

SEQ ID NO: 2072 - protein, 7 aa, synthetic construct
RGDRQYL

SEQ ID NO: 2073 - protein, 7 aa, synthetic construct
RGDRAAL

SEQ ID NO: 2074 - protein, 7 aa, synthetic construct
RGDRAYL

SEQ ID NO: 2075 - protein, 7 aa, synthetic construct
RGDRQAL

SEQ ID NO: 2076 - protein, 7 aa, synthetic construct
RGDRQSL

SEQ ID NO: 2077 - protein, 7 aa, synthetic construct
RGDRQYL

SEQ ID NO: 2078 - protein, 7 aa, synthetic construct
RGDRAYL

SEQ ID NO: 2079 - protein, 7 aa, synthetic construct
RGDRAAL

SEQ ID NO: 2080 - protein, 7 aa, synthetic construct
RGDRQAL

SEQ ID NO: 2081 - protein, 7 aa, synthetic construct
RGDRQYL

SEQ ID NO: 2082 - protein, 7 aa, synthetic construct
RGDRAYL

SEQ ID NO: 2083 - protein, 7 aa, synthetic construct
RGDRQYL

SEQ ID NO: 2084 - protein, 7 aa, synthetic construct
RGDRGAL

SEQ ID NO: 2085 - protein, 7 aa, synthetic construct
RGDRAAL

SEQ ID NO: 2086 - protein, 7 aa, synthetic construct
RGDRGYL

SEQ ID NO: 2087 - protein, 7 aa, synthetic construct
RGDRQAL

SEQ ID NO: 2088 - protein, 7 aa, synthetic construct
RGDRQSL

SEQ ID NO: 2089 - protein, 7 aa, synthetic construct
RGDRAAL

SEQ ID NO: 2090 - protein, 7 aa, synthetic construct
RGDRASL

SEQ ID NO: 2091 - protein, 7 aa, synthetic construct
RGDRGSL

SEQ ID NO: 2092 - protein, 7 aa, synthetic construct
RGDRQAL

SEQ ID NO: 2093 - protein, 7 aa, synthetic construct
RGDRQSL

SEQ ID NO: 2094 - protein, 7 aa, synthetic construct
RGDRQAL

SEQ ID NO: 2095 - protein, 7 aa, synthetic construct
RGDRAAL

SEQ ID NO: 2096 - protein, 7 aa, synthetic construct
RGDRQAL

SEQ ID NO: 2097 - protein, 7 aa, synthetic construct
RGDRQSL

SEQ ID NO: 2098 - protein, 7 aa, synthetic construct
RGDRQYL

SEQ ID NO: 2099 - protein, 7 aa, synthetic construct
RGDRGAL

SEQ ID NO: 2100 - protein, 7 aa, synthetic construct
RGDRGAL

SEQ ID NO: 2101 - protein, 7 aa, synthetic construct
RGDRAAL

SEQ ID NO: 2102 - protein, 7 aa, synthetic construct
RGDRASL

SEQ ID NO: 2103 - protein, 7 aa, synthetic construct
RGDRAYL

SEQ ID NO: 2104 - protein, 7 aa, synthetic construct
RGDRGAL

SEQ ID NO: 2105 - protein, 7 aa, synthetic construct
RGDRGSL

SEQ ID NO: 2106 - protein, 7 aa, synthetic construct
RGDRGYL

SEQ ID NO: 2107 - protein, 7 aa, synthetic construct
RGDRQAL

SEQ ID NO: 2108 - protein, 7 aa, synthetic construct
RGDRQSL

SEQ ID NO: 2109 - protein, 7 aa, synthetic construct
RGDRQYL

SEQ ID NO: 2110 - protein, 7 aa, synthetic construct
RGDRAAL

SEQ ID NO: 2111 - protein, 7 aa, synthetic construct
RGDRASL

SEQ ID NO: 2112 - protein, 7 aa, synthetic construct
RGDRAYL

SEQ ID NO: 2113 - protein, 7 aa, synthetic construct
RGDRGAL

SEQ ID NO: 2114 - protein, 7 aa, synthetic construct
RGDRGSL

SEQ ID NO: 2115 - protein, 7 aa, synthetic construct
RGDRGYL

SEQ ID NO: 2116 - protein, 7 aa, synthetic construct
RGDRQAL

SEQ ID NO: 2117 - protein, 7 aa, synthetic construct
RGDRQSL

SEQ ID NO: 2118 - protein, 7 aa, synthetic construct
RGDRQYL

SEQ ID NO: 2119 - protein, 7 aa, synthetic construct
RGDRQLL

SEQ ID NO: 2120 - protein, 7 aa, synthetic construct
RGDRAAL

SEQ ID NO: 2121 - protein, 7 aa, synthetic construct
RGDRASL

SEQ ID NO: 2122 - protein, 7 aa, synthetic construct
RGDRGAL

SEQ ID NO: 2123 - protein, 7 aa, synthetic construct
RGDRGSL

SEQ ID NO: 2124 - protein, 7 aa, synthetic construct
RGDRQAL

SEQ ID NO: 2125 - protein, 7 aa, synthetic construct
RGDRQSL

SEQ ID NO: 2126 - protein, 7 aa, synthetic construct
RGDRAAL

SEQ ID NO: 2127 - protein, 7 aa, synthetic construct
RGDRASL

SEQ ID NO: 2128 - protein, 7 aa, synthetic construct
RGDRAYL

SEQ ID NO: 2129 - protein, 7 aa, synthetic construct
RGDRGAL

SEQ ID NO: 2130 - protein, 7 aa, synthetic construct
RGDRGSL

SEQ ID NO: 2131 - protein, 7 aa, synthetic construct
RGDRQAL

SEQ ID NO: 2132 - protein, 7 aa, synthetic construct
RGDRQSL

SEQ ID NO: 2133 - protein, 7 aa, synthetic construct
RGDRQYL

SEQ ID NO: 2134 - protein, 7 aa, synthetic construct
RGDRAAL

SEQ ID NO: 2135 - protein, 7 aa, synthetic construct
RGDRASL

SEQ ID NO: 2136 - protein, 7 aa, synthetic construct
RGDRAYL

SEQ ID NO: 2137 - protein, 7 aa, synthetic construct
RGDRGAL

SEQ ID NO: 2138 - protein, 7 aa, synthetic construct
RGDRGSL

SEQ ID NO: 2139 - protein, 7 aa, synthetic construct
RGDRGYL

SEQ ID NO: 2140 - protein, 7 aa, synthetic construct
RGDRQAL

SEQ ID NO: 2141 - protein, 7 aa, synthetic construct
RGDRQSL

SEQ ID NO: 2142 - protein, 7 aa, synthetic construct
RGDRQYL

SEQ ID NO: 2143 - protein, 7 aa, synthetic construct
RGDRAAL

SEQ ID NO: 2144 - protein, 7 aa, synthetic construct
RGDRASL

SEQ ID NO: 2145 - protein, 7 aa, synthetic construct
RGDRAYL

SEQ ID NO: 2146 - protein, 7 aa, synthetic construct
RGDRGSL

SEQ ID NO: 2147 - protein, 7 aa, synthetic construct
RGDRGYL

SEQ ID NO: 2148 - protein, 7 aa, synthetic construct
RGDRQAL

SEQ ID NO: 2149 - protein, 7 aa, synthetic construct
RGDRQSL

SEQ ID NO: 2150 - protein, 7 aa, synthetic construct
RGDRQYL

SEQ ID NO: 2151 - protein, 7 aa, synthetic construct
RGDRQNL

SEQ ID NO: 2152 - protein, 7 aa, synthetic construct
RGDRGML

SEQ ID NO: 2153 - protein, 7 aa, synthetic construct
RGDRGYL

SEQ ID NO: 2154 - protein, 7 aa, synthetic construct
RGDRQAL

SEQ ID NO: 2155 - protein, 7 aa, synthetic construct
RGDRQSL

SEQ ID NO: 2156 - protein, 7 aa, synthetic construct
RGDRQYL

SEQ ID NO: 2157 - protein, 7 aa, synthetic construct
RGDRASL

SEQ ID NO: 2158 - protein, 7 aa, synthetic construct
RGDRAYL

SEQ ID NO: 2159 - protein, 7 aa, synthetic construct
RGDRGAL

SEQ ID NO: 2160 - protein, 7 aa, synthetic construct
RGDRGSL

SEQ ID NO: 2161 - protein, 7 aa, synthetic construct
RGDRGYL

SEQ ID NO: 2162 - protein, 7 aa, synthetic construct
RGDRQAL

SEQ ID NO: 2163 - protein, 7 aa, synthetic construct
RGDRQSL

SEQ ID NO: 2164 - protein, 7 aa, synthetic construct
RGDRQYL

SEQ ID NO: 2165 - protein, 7 aa, synthetic construct
RGDRAYL

SEQ ID NO: 2166 - protein, 7 aa, synthetic construct
RGDRGYL

SEQ ID NO: 2167 - protein, 7 aa, synthetic construct
RGDRQAL

SEQ ID NO: 2168 - protein, 7 aa, synthetic construct
RGDRQSL

SEQ ID NO: 2169 - protein, 7 aa, synthetic construct
RGDRQYL

SEQ ID NO: 2170 - protein, 7 aa, synthetic construct
RGDRGYL

SEQ ID NO: 2171 - protein, 7 aa, synthetic construct
RGDRQYL

SEQ ID NO: 2172 - protein, 7 aa, synthetic construct
RGDRAAL

SEQ ID NO: 2173 - protein, 7 aa, synthetic construct
RGDRASL

SEQ ID NO: 2174 - protein, 7 aa, synthetic construct
RGDRGAL

SEQ ID NO: 2175 - protein, 7 aa, synthetic construct
RGDRGYL

SEQ ID NO: 2176 - protein, 7 aa, synthetic construct
RGDRQAL

SEQ ID NO: 2177 - protein, 7 aa, synthetic construct
RGDRQSL

SEQ ID NO: 2178 - protein, 7 aa, synthetic construct
RGDRQYL

SEQ ID NO: 2179 - protein, 7 aa, synthetic construct
RGDRGYL

SEQ ID NO: 2180 - protein, 7 aa, synthetic construct
RGDRQAL

SEQ ID NO: 2181 - protein, 7 aa, synthetic construct
RGDRQSL

SEQ ID NO: 2182 - protein, 7 aa, synthetic construct
RGDRQYL

SEQ ID NO: 2183 - protein, 7 aa, synthetic construct
RGDRGAL

SEQ ID NO: 2184 - protein, 7 aa, synthetic construct
RGDRAYL

SEQ ID NO: 2185 - protein, 7 aa, synthetic construct
RGDRGAL

SEQ ID NO: 2186 - protein, 7 aa, synthetic construct
RGDRGIL

SEQ ID NO: 2187 - protein, 7 aa, synthetic construct
RGDRGSL

SEQ ID NO: 2188 - protein, 7 aa, synthetic construct
RGDRGYL

SEQ ID NO: 2189 - protein, 7 aa, synthetic construct
RGDRQAL

SEQ ID NO: 2190 - protein, 7 aa, synthetic construct
RGDRQSL

SEQ ID NO: 2191 - protein, 7 aa, synthetic construct
RGDRQYL

SEQ ID NO: 2192 - protein, 7 aa, synthetic construct
RGDRAAL

SEQ ID NO: 2193 - protein, 7 aa, synthetic construct
RGDRAYL

SEQ ID NO: 2194 - protein, 7 aa, synthetic construct
RGDRGAL

SEQ ID NO: 2195 - protein, 7 aa, synthetic construct
RGDRGSL

SEQ ID NO: 2196 - protein, 7 aa, synthetic construct
RGDRGYL

SEQ ID NO: 2197 - protein, 7 aa, synthetic construct
RGDRQAL

SEQ ID NO: 2198 - protein, 7 aa, synthetic construct
RGDRQSL

SEQ ID NO: 2199 - protein, 7 aa, synthetic construct
RGDRQYL

SEQ ID NO: 2200 - protein, 7 aa, synthetic construct
RGDRAAL

SEQ ID NO: 2201 - protein, 7 aa, synthetic construct
RGDRASL

SEQ ID NO: 2202 - protein, 7 aa, synthetic construct
RGDRAYL

SEQ ID NO: 2203 - protein, 7 aa, synthetic construct
RGDRGSL

SEQ ID NO: 2204 - protein, 7 aa, synthetic construct
RGDRQAL

SEQ ID NO: 2205 - protein, 7 aa, synthetic construct
RGDRQSL

SEQ ID NO: 2206 - protein, 7 aa, synthetic construct
RGDRQYL

SEQ ID NO: 2207 - protein, 7 aa, synthetic construct
RGDRAAL

SEQ ID NO: 2208 - protein, 7 aa, synthetic construct
RGDRGSL

SEQ ID NO: 2209 - protein, 7 aa, synthetic construct
RGDRQAL

SEQ ID NO: 2210 - protein, 7 aa, synthetic construct
RGDRQSL

SEQ ID NO: 2211 - protein, 7 aa, synthetic construct
RGDRQYL

SEQ ID NO: 2212 - protein, 7 aa, synthetic construct
RGDRAAL

SEQ ID NO: 2213 - protein, 7 aa, synthetic construct
RGDRASL

SEQ ID NO: 2214 - protein, 7 aa, synthetic construct
RGDRGSL

SEQ ID NO: 2215 - protein, 7 aa, synthetic construct
RGDRGYL

SEQ ID NO: 2216 - protein, 7 aa, synthetic construct
RGDRQAL

SEQ ID NO: 2217 - protein, 7 aa, synthetic construct
RGDRQSL

SEQ ID NO: 2218 - protein, 7 aa, synthetic construct
RGDRQYL

SEQ ID NO: 2219 - protein, 7 aa, synthetic construct
RGDRQAL

SEQ ID NO: 2220 - protein, 7 aa, synthetic construct
RGDRQSL

SEQ ID NO: 2221 - protein, 7 aa, synthetic construct
RGDRQYL

SEQ ID NO: 2222 - protein, 7 aa, synthetic construct
RGDRAAL

SEQ ID NO: 2223 - protein, 7 aa, synthetic construct
RGDRGAL

SEQ ID NO: 2224 - protein, 7 aa, synthetic construct
RGDRGSL

SEQ ID NO: 2225 - protein, 7 aa, synthetic construct
RGDRGYL

SEQ ID NO: 2226 - protein, 7 aa, synthetic construct
RGDRQAL

SEQ ID NO: 2227 - protein, 7 aa, synthetic construct
RGDRQSL

SEQ ID NO: 2228 - protein, 7 aa, synthetic construct
RGDRQYL

SEQ ID NO: 2229 - protein, 7 aa, synthetic construct
RGDRAAL

SEQ ID NO: 2230 - protein, 7 aa, synthetic construct
RGDRASL

SEQ ID NO: 2231 - protein, 7 aa, synthetic construct
RGDRGAL

SEQ ID NO: 2232 - protein, 7 aa, synthetic construct
RGDRGSL

SEQ ID NO: 2233 - protein, 7 aa, synthetic construct
RGDRGYL

SEQ ID NO: 2234 - protein, 7 aa, synthetic construct
RGDRQAL

SEQ ID NO: 2235 - protein, 7 aa, synthetic construct
RGDRQSL

SEQ ID NO: 2236 - protein, 7 aa, synthetic construct
RGDRQYL

SEQ ID NO: 2237 - protein, 7 aa, synthetic construct
RGDRAYL

SEQ ID NO: 2238 - protein, 7 aa, synthetic construct
RGDRGSL

SEQ ID NO: 2239 - protein, 7 aa, synthetic construct
RGDRQAL

SEQ ID NO: 2240 - protein, 7 aa, synthetic construct
RGDRQSL

SEQ ID NO: 2241 - protein, 7 aa, synthetic construct
RGDRQAL

SEQ ID NO: 2242 - protein, 7 aa, synthetic construct
RGDRQAL

SEQ ID NO: 2243 - protein, 7 aa, synthetic construct
RGDRQSL

SEQ ID NO: 2244 - protein, 7 aa, synthetic construct
RGDRQYL

SEQ ID NO: 2245 - protein, 7 aa, synthetic construct
RGDRAYL

SEQ ID NO: 2246 - protein, 7 aa, synthetic construct
RGDRQAL

SEQ ID NO: 2247 - protein, 7 aa, synthetic construct
RGDRQSL

SEQ ID NO: 2248 - protein, 7 aa, synthetic construct
RGDRQYL

SEQ ID NO: 2249 - protein, 7 aa, synthetic construct
RGDRGAL

SEQ ID NO: 2250 - protein, 7 aa, synthetic construct
RGDRAAL

SEQ ID NO: 2251 - protein, 7 aa, synthetic construct
RGDRASL

SEQ ID NO: 2252 - protein, 7 aa, synthetic construct
RGDRGAL

SEQ ID NO: 2253 - protein, 7 aa, synthetic construct
RGDRGSL

SEQ ID NO: 2254 - protein, 7 aa, synthetic construct
RGDRQAL

SEQ ID NO: 2255 - protein, 7 aa, synthetic construct
RGDRQSL

SEQ ID NO: 2256 - protein, 7 aa, synthetic construct
RGDRQYL

SEQ ID NO: 2257 - protein, 7 aa, synthetic construct
RGDRAAL

SEQ ID NO: 2258 - protein, 7 aa, synthetic construct
RGDRGAL

SEQ ID NO: 2259 - protein, 7 aa, synthetic construct
RGDRGSL

SEQ ID NO: 2260 - protein, 7 aa, synthetic construct
RGDRQAL

SEQ ID NO: 2261 - protein, 7 aa, synthetic construct
RGDRQSL

SEQ ID NO: 2262 - protein, 7 aa, synthetic construct
RGDRAAL

SEQ ID NO: 2263 - protein, 7 aa, synthetic construct
RGDRASL

SEQ ID NO: 2264 - protein, 7 aa, synthetic construct
RGDRGSL

SEQ ID NO: 2265 - protein, 7 aa, synthetic construct
RGDRQAL

SEQ ID NO: 2266 - protein, 7 aa, synthetic construct
RGDRQSL

SEQ ID NO: 2267 - protein, 7 aa, synthetic construct
RGDRGAL

SEQ ID NO: 2268 - protein, 7 aa, synthetic construct
RGDRGSL

SEQ ID NO: 2269 - protein, 7 aa, synthetic construct
RGDRQAL

SEQ ID NO: 2270 - protein, 7 aa, synthetic construct
RGDRQSL

SEQ ID NO: 2271 - protein, 7 aa, synthetic construct
RGDRAAL

SEQ ID NO: 2272 - protein, 7 aa, synthetic construct
RGDRGAL

SEQ ID NO: 2273 - protein, 7 aa, synthetic construct
RGDRGSL

SEQ ID NO: 2274 - protein, 7 aa, synthetic construct
RGDRQAL

SEQ ID NO: 2275 - protein, 7 aa, synthetic construct
RGDRQSL

SEQ ID NO: 2276 - protein, 7 aa, synthetic construct
RGDRQYL

SEQ ID NO: 2277 - protein, 7 aa, synthetic construct
RGDRQAL

SEQ ID NO: 2278 - protein, 7 aa, synthetic construct
RGDRQSL

SEQ ID NO: 2279 - protein, 7 aa, synthetic construct
RGDRQYL

SEQ ID NO: 2280 - protein, 7 aa, synthetic construct
RGDRGAL

SEQ ID NO: 2281 - protein, 7 aa, synthetic construct
RGDRAAL

SEQ ID NO: 2282 - protein, 7 aa, synthetic construct
RGDRGAL

SEQ ID NO: 2283 - protein, 7 aa, synthetic construct
RGDRGSL

SEQ ID NO: 2284 - protein, 7 aa, synthetic construct
RGDRGYL

SEQ ID NO: 2285 - protein, 7 aa, synthetic construct
RGDRQAL

SEQ ID NO: 2286 - protein, 7 aa, synthetic construct
RGDRQYL

SEQ ID NO: 2287 - protein, 7 aa, synthetic construct
RGDRAAL

SEQ ID NO: 2288 - protein, 7 aa, synthetic construct
RGDRAYL

SEQ ID NO: 2289 - protein, 7 aa, synthetic construct
RGDRGAL

SEQ ID NO: 2290 - protein, 7 aa, synthetic construct
RGDRGSL

SEQ ID NO: 2291 - protein, 7 aa, synthetic construct
RGDRGYL

SEQ ID NO: 2292 - protein, 7 aa, synthetic construct
RGDRQAL

SEQ ID NO: 2293 - protein, 7 aa, synthetic construct
RGDRQYL

SEQ ID NO: 2294 - protein, 7 aa, synthetic construct
RGDRAYL

SEQ ID NO: 2295 - protein, 7 aa, synthetic construct
RGDRQAL

SEQ ID NO: 2296 - protein, 7 aa, synthetic construct
RGDRQSL

SEQ ID NO: 2297 - protein, 7 aa, synthetic construct
RGDRGSL

SEQ ID NO: 2298 - protein, 7 aa, synthetic construct
RGDRQAL

SEQ ID NO: 2299 - protein, 7 aa, synthetic construct
RGDRQYL

SEQ ID NO: 2300 - protein, 7 aa, synthetic construct
RGDRAAL

SEQ ID NO: 2301 - protein, 7 aa, synthetic construct
RGDRGAL

SEQ ID NO: 2302 - protein, 7 aa, synthetic construct
RGDRGSL

SEQ ID NO: 2303 - protein, 7 aa, synthetic construct
RGDRGYL

SEQ ID NO: 2304 - protein, 7 aa, synthetic construct
RGDRQAL

SEQ ID NO: 2305 - protein, 7 aa, synthetic construct
RGDRQSL

SEQ ID NO: 2306 - protein, 7 aa, synthetic construct
RGDRQYL

SEQ ID NO: 2307 - protein, 7 aa, synthetic construct
RGDRGSL

SEQ ID NO: 2308 - protein, 7 aa, synthetic construct
RGDRGYL

SEQ ID NO: 2309 - protein, 7 aa, synthetic construct
RGDRQAL

SEQ ID NO: 2310 - protein, 7 aa, synthetic construct
RGDRQSL

SEQ ID NO: 2311 - protein, 7 aa, synthetic construct
RGDRQYL

SEQ ID NO: 2312 - protein, 7 aa, synthetic construct
RGDRQNL

SEQ ID NO: 2313 - protein, 7 aa, synthetic construct
RGDRGML

SEQ ID NO: 2314 - protein, 7 aa, synthetic construct
RGDRAYL

SEQ ID NO: 2315 - protein, 7 aa, synthetic construct
RGDRGAL

SEQ ID NO: 2316 - protein, 7 aa, synthetic construct
RGDRGSL

SEQ ID NO: 2317 - protein, 7 aa, synthetic construct
RGDRGYL

SEQ ID NO: 2318 - protein, 7 aa, synthetic construct
RGDRQAL

SEQ ID NO: 2319 - protein, 7 aa, synthetic construct
RGDRQSL

SEQ ID NO: 2320 - protein, 7 aa, synthetic construct
RGDRQYL

SEQ ID NO: 2321 - protein, 7 aa, synthetic construct
RGDRAAL

SEQ ID NO: 2322 - protein, 7 aa, synthetic construct
RGDRASL

SEQ ID NO: 2323 - protein, 7 aa, synthetic construct
RGDRAYL

SEQ ID NO: 2324 - protein, 7 aa, synthetic construct
RGDRGAL

SEQ ID NO: 2325 - protein, 7 aa, synthetic construct
RGDRGSL

SEQ ID NO: 2326 - protein, 7 aa, synthetic construct
RGDRGYL

SEQ ID NO: 2327 - protein, 7 aa, synthetic construct
RGDRQAL

SEQ ID NO: 2328 - protein, 7 aa, synthetic construct
RGDRQSL

SEQ ID NO: 2329 - protein, 7 aa, synthetic construct
RGDRQYL

SEQ ID NO: 2330 - protein, 7 aa, synthetic construct
RGDRGYL

SEQ ID NO: 2331 - protein, 7 aa, synthetic construct
RGDRQAL

SEQ ID NO: 2332 - protein, 7 aa, synthetic construct
RGDRQSL

SEQ ID NO: 2333 - protein, 7 aa, synthetic construct
RGDRQYL

SEQ ID NO: 2334 - protein, 7 aa, synthetic construct
RGDRAYL

SEQ ID NO: 2335 - protein, 7 aa, synthetic construct
RGDRGAL

SEQ ID NO: 2336 - protein, 7 aa, synthetic construct
RGDRGSL

SEQ ID NO: 2337 - protein, 7 aa, synthetic construct
RGDRQAL

SEQ ID NO: 2338 - protein, 7 aa, synthetic construct
RGDRQSL

SEQ ID NO: 2339 - protein, 7 aa, synthetic construct
RGDRQYL

SEQ ID NO: 2340 - protein, 7 aa, synthetic construct
RGDRAAL

SEQ ID NO: 2341 - protein, 7 aa, synthetic construct
RGDRAYL

SEQ ID NO: 2342 - protein, 7 aa, synthetic construct
RGDRGAL

SEQ ID NO: 2343 - protein, 7 aa, synthetic construct
RGDRGYL

SEQ ID NO: 2344 - protein, 7 aa, synthetic construct
RGDRQAL

SEQ ID NO: 2345 - protein, 7 aa, synthetic construct
RGDRQSL

SEQ ID NO: 2346 - protein, 7 aa, synthetic construct
RGDRQYL

SEQ ID NO: 2347 - protein, 7 aa, synthetic construct
RGDRAYL

SEQ ID NO: 2348 - protein, 7 aa, synthetic construct
RGDRQAL

SEQ ID NO: 2349 - protein, 7 aa, synthetic construct
RGDRQSL

SEQ ID NO: 2350 - protein, 7 aa, synthetic construct
RGDRQYL

SEQ ID NO: 2351 - protein, 7 aa, synthetic construct
RGDRGAL

SEQ ID NO: 2352 - protein, 7 aa, synthetic construct
RGDRGAL

SEQ ID NO: 2353 - protein, 7 aa, synthetic construct
RGDRGSL

SEQ ID NO: 2354 - protein, 7 aa, synthetic construct
RGDRGYL

SEQ ID NO: 2355 - protein, 7 aa, synthetic construct
RGDRQAL

SEQ ID NO: 2356 - protein, 7 aa, synthetic construct
RGDRQSL

SEQ ID NO: 2357 - protein, 7 aa, synthetic construct
RGDRQYL

SEQ ID NO: 2358 - protein, 7 aa, synthetic construct
RGDRAAL

SEQ ID NO: 2359 - protein, 7 aa, synthetic construct
RGDRAYL

SEQ ID NO: 2360 - protein, 7 aa, synthetic construct
RGDRGAL

SEQ ID NO: 2361 - protein, 7 aa, synthetic construct
RGDRQAL

SEQ ID NO: 2362 - protein, 7 aa, synthetic construct
RGDRQSL

SEQ ID NO: 2363 - protein, 7 aa, synthetic construct
RGDRQYL

SEQ ID NO: 2364 - protein, 7 aa, synthetic construct
RGDRAYL

SEQ ID NO: 2365 - protein, 7 aa, synthetic construct
RGDRQAL

SEQ ID NO: 2366 - protein, 7 aa, synthetic construct
RGDRQSL

SEQ ID NO: 2367 - protein, 7 aa, synthetic construct
RGDRQYL

SEQ ID NO: 2368 - protein, 7 aa, synthetic construct
RGDRGSL

SEQ ID NO: 2369 - protein, 7 aa, synthetic construct
RGDRQAL

SEQ ID NO: 2370 - protein, 7 aa, synthetic construct
RGDRQSL

SEQ ID NO: 2371 - protein, 7 aa, synthetic construct
RGDRGAL

SEQ ID NO: 2372 - protein, 7 aa, synthetic construct
RGDRQAL

SEQ ID NO: 2373 - protein, 7 aa, synthetic construct
RGDRQSL

SEQ ID NO: 2374 - protein, 7 aa, synthetic construct
RGDRQYL

SEQ ID NO: 2375 - protein, 7 aa, synthetic construct
RGDRAYL

SEQ ID NO: 2376 - protein, 7 aa, synthetic construct
RGDRQAL

SEQ ID NO: 2377 - protein, 7 aa, synthetic construct
RGDRQSL

SEQ ID NO: 2378 - protein, 7 aa, synthetic construct
RGDRAYL

SEQ ID NO: 2379 - protein, 7 aa, synthetic construct
RGDRAAL

SEQ ID NO: 2380 - protein, 7 aa, synthetic construct
RGDRGAL

SEQ ID NO: 2381 - protein, 7 aa, synthetic construct
RGDRGSL

SEQ ID NO: 2382 - protein, 7 aa, synthetic construct
RGDRGYL

SEQ ID NO: 2383 - protein, 7 aa, synthetic construct
RGDRQAL

SEQ ID NO: 2384 - protein, 7 aa, synthetic construct
RGDRQSL

SEQ ID NO: 2385 - protein, 7 aa, synthetic construct
RGDRQYL

SEQ ID NO: 2386 - protein, 7 aa, synthetic construct
RGDRAYL

SEQ ID NO: 2387 - protein, 7 aa, synthetic construct
RGDRGAL

SEQ ID NO: 2388 - protein, 7 aa, synthetic construct
RGDRGAL

SEQ ID NO: 2389 - protein, 7 aa, synthetic construct
RGDRGSL

SEQ ID NO: 2390 - protein, 7 aa, synthetic construct
RGDRQAL

SEQ ID NO: 2391 - protein, 7 aa, synthetic construct
RGDRQSL

SEQ ID NO: 2392 - protein, 7 aa, synthetic construct
RGDRAAL

SEQ ID NO: 2393 - protein, 7 aa, synthetic construct
RGDRGAL

SEQ ID NO: 2394 - protein, 7 aa, synthetic construct
RGDRQAL

SEQ ID NO: 2395 - protein, 7 aa, synthetic construct
RGDRQSL

SEQ ID NO: 2396 - protein, 7 aa, synthetic construct
RGDRQYL

SEQ ID NO: 2397 - protein, 7 aa, synthetic construct
RGDRGSL

SEQ ID NO: 2398 - protein, 7 aa, synthetic construct
RGDRGYL

SEQ ID NO: 2399 - DNA, 22 bp, synthetic construct
  source 1..22: mol_type = other DNA
caacaaaatcactgatgctgga

SEQ ID NO: 2400 - DNA, 23 bp, synthetic construct
  source 1..23: mol_type = other DNA
cggcctgattcacaacaccagct

SEQ ID NO: 2401 - DNA, 23 bp, synthetic construct
  source 1..23: mol_type = other DNA
tcatacagctagataaccaaaga

SEQ ID NO: 2402 - DNA, 683 bp, synthetic construct
  source 1..683: mol_type = other DNA
tagttattaatagtaatcaattacggggtcattagttcatagcccatatatggagttccgcgttacataacttacggtaaatggcccgcctggctgaccgcccaacgacccccgcccattgacgtcaataatgacgtatgttcccatagtaacgccaatagggactttccattgacgtcaatgggtggagtatttacggtaaactgcccacttggcagtacatcaagtgtatcatatgccaagtacgccccctattgacgtcaatgacggtaaatggcccgcctggcattatgcccagtacatgaccttatgggactttcctacttggcagtacatctacgtattagtcatcgctattaccatgctagactagcatgctgcccatgtaaggaggcaaggcctggggacacccgagatgcctggttataattaacccagacatgtggctgccccccccccccaacacctgctgcctctaaaaataaccctgcatgccatgttcccggcgaagggccagctgtcccccgccagctagactcagctctcaggggcccctccctggggacagcccctcctggctagtcacaccctgtaggctcctctatataacccaggggcacaggggctgccctcattctaccaccacctccacagcacagacagacactcaggagccagccagc

SEQ ID NO: 2403 - DNA, 643 bp, synthetic construct
  source 1..643: mol_type = other DNA
cgtctgtctaattccagccaagggcatgggggaaaggacagagcccagggacctgtggcctattctctgagaggacgctgggctaataataggaggggagattagggagggatttgactgcattgttatctcacaggaatggcgtttgagagccttgcttccaagctcttccaagagtcatgccacccccctccaatctctgtggaagtgcccactgcctttcccgcttcgttctcttctctctaaatctgagcccaccccactcaggggtacaggatctggttcatttatctcccagaatgatgccttgggttgcgtcccctctaaactctggcacattccagcccctctttgggagaaagaacatctcttcttgcccaggccctagtgagacatgcatcgcaagacatgctccccccttcctccccgctgggctccagctgctgccagccctccaagaaaggagaggccctgagttgggctattttggtatctggggtgggcacccgcagggctaaggttaccttggtatgttaagggctccctggggcaggactatataaccccagagggactgccccatgctgactccttgcttctttcctgctcgagccgctgccttgccccccggagactgaagaca

SEQ ID NO: 2404 - DNA, 643 bp, synthetic construct
  source 1..643: mol_type = other DNA
cgtctgtctaattccagccaagggcatgggggaaaggacagagcccagggacctgtggcctattctctgagaggacgctgggctaataataggaggggagattagggagggatttgactgcattgttatctcacaggaatggcgtttgagagccttgcttccaagctcttccaagagtcatgccacccccctccaatctctgtggaagtgcccactgcctttcccgcttcgttctcttctctcggtcccatccctgacccactagcctggtgccggggggagaccaatttctggaggaagctctgggtacccagtcttgccctaagcctgcctctgaacaggctgttcttgtttatgacccccgtcccagcagaatagtgattgctcatccctgcatgtgatttgagagggccagtctttcaggcctggaggaaactcaagccccaccagccgcttggcatcggaatgctcagctggtcccctcctggggctcatgtgaccaagatctagctataaatatcagaggggcctcagaccaagacagaattcgggcaccaggagaaggaagccaacaggatccgacccggtgttttgtgacaaaggcaagacccccaggtctacttagagcaacgttagtagagga

SEQ ID NO: 2405 - DNA, 3579 bp, synthetic construct
  source 1..3579: mol_type = other DNA
atgctgtggtgggaggaagtggaggactgctacgagagagaggacgtgcagaagaagaccttcaccaagtgggtgaacgcccagttcagcaagttcggcaagcagcacatcgagaacctgttcagcgacctgcaggacggcagaagactgctggacctgctggagggcctgaccggccagaagctgcctaaggagaagggcagcaccagagtgcacgctctcaacaacgtgaacaaggccctgagagtgctgcagaacaacaacgtggaccttgtgaacatcggaagcaccgacatcgtggatggcaaccacaagctgaccctgggactgatctggaacatcatcctgcactggcaggtgaagaacgtcatgaagaacatcatggccggcctgcagcagaccaacagcgaaaagatcctgctgagctgggtcagacagagcaccagaaactaccctcaggtgaacgtgatcaacttcaccaccagctggagcgacggcctggccctgaacgccctgatccacagccacagacccgacctgttcgactggaacagcgtggtgtgccagcagagcgccacccagagactggagcacgccttcaacatcgccagataccagctgggcatcgagaagctgctggaccccgaggacgtggataccacctaccccgacaagaagagcatcctgatgtacatcaccagcctgttccaggtgctgccccagcaagtgagcatcgaggccatccaggaggtggagatgctgcccagacctccaaaggtgaccaaggaggagcacttccagctgcaccaccagatgcactacagccagcagatcaccgtgagcctggcccagggctacgagagaaccagcagccccaagcccagattcaagagctacgcctacacccaggccgcctacgtgaccaccagcgaccccaccagaagccccttccccagccagcacctggaggcccccgaggataagagcttcggcagcagcctgatggagagcgaggtgaacttggacagataccagaccgccctggaggaggtgctgagctggctgctgagcgccgaggacacccttcaggcacagggcgagatcagcaacgacgtggaggtggtgaaggaccagttccacacccacgagggctacatgatggacctgaccgcccaccagggcagagtgggtaacatcctccagctgggaagcaagctgatcggcaccggcaagctgagcgaggacgaggagaccgaggtgcaagagcaaatgaacctgcttaacagcagatgggagtgcctgagagtggccagcatggagaagcagagcaacctgcacagagtgctgatggacctgcagaaccagaagctgaaggagctgaacgactggctgaccaagaccgaggagagaaccagaaagatggaggaggagcccctgggcccggacctggaggacctgaagcggcaggtgcagcagcacaaggtcttacaggaggacctggagcaggagcaagtgagagtgaacagcctgacccacatggtggtggtggtggatgagagcagcggcgaccacgccaccgccgccctggaggagcagctgaaggtgctgggcgacagatgggccaacatctgcagatggaccgaggacagatgggttctgctgcaggacatcctgctgaagtggcagagactgaccgaggaacagtgcctgttcagcgcctggctgagtgagaaggaagacgctgtgaacaagatccacaccaccggcttcaaggaccagaacgagatgctgagcagcctgcagaagctggccgtgctgaaggcagacctggagaagaaaaagcagtccatgggaaagctgtacagcctgaagcaagacctgctgagcaccctgaagaacaagagcgtgacccagaagaccgaggcctggctggacaacttcgccagatgctgggacaacctggttcagaagctggagaagagcaccgcccagatcagccaggccgtgaccaccacccagcccagcctgacccagaccaccgtgatggagaccgtgaccaccgtgaccaccagagagcagatcctggtgaagcacgcccaggaggagctgccccctcctcccccgcaaaagaagagaaccctggagagactgcaggagctgcaggaggctaccgatgagctggacctgaagctgagacaggccgaggtgatcaagggcagctggcagcccgtgggtgacctgcttatcgacagcctgcaggaccacctagagaaggtgaaggccctgagaggcgagatcgcccctctgaaggagaacgtgagccacgtgaacgacctggccagacagctgaccaccctgggaatccagctgagcccctacaacctgagcaccctggaggacctgaacacgagatggaagctgctgcaagtggccgtggaggacagagtcagacagttgcacgaggctcacagagatttcggccccgctagtcagcacttcctgagcaccagcgtgcagggcccctgggagagagctatcagcccaaacaaggtgccctactacatcaaccacgagacccagaccacctgctgggaccaccccaagatgaccgagctgtaccagagcctggcagacctcaacaacgtgagattcagcgcctacagaaccgccatgaagctgagaagactgcagaaggccctgtgcctggacctgctgagcctgagcgccgcctgcgacgccctggaccagcacaacctgaagcagaacgaccagcccatggacatccttcagatcatcaactgcctgaccaccatctacgacagactggagcaggaacataacaacctggtgaacgtgcccctgtgcgtggacatgtgcctgaactggctgctgaacgtgtacgacaccggcagaacaggcagaatcagagtgctgagcttcaagaccggcatcatcagcctgtgcaaggcccacctggaggacaagtacagatacttattcaagcaggtggccagcagcaccggcttctgcgatcagagaagactgggcctgctgctgcacgacagcatccagatccccagacagctgggcgaagtggccagcttcggcggcagcaacatcgagcccagcgtgagaagctgcttccagttcgctaacaacaagcccgagatcgaggccgccctgttcttggactggatgagactggagccccagagcatggtgtggctgcccgtgctgcacagagtggccgccgccgagaccgccaagcaccaggccaagtgtaacatctgcaaggagtgcccaatcatcggcttcagatacagaagcctgaagcacttcaactacgacatctgccagagctgcttcttcagcggcagagtggccaagggccacaagatgcactaccccatggtggagtactgcacccccaccaccagcggcgaggacgtgagagacttcgcaaaggtcctgaagaacaagttcagaaccaagagatacttcgctaagcaccccagaatgggctacctgcccgtgcagaccgtgctggagggcgataacatggagaccgacaccatgtga

SEQ ID NO: 2406 - DNA, 3579 bp, synthetic construct
  source 1..3579: mol_type = other DNA
atgctgtggtgggaagaggtcgaggactgctacgagcgcgaagatgtgcagaagaaaactttcactaaatgggtgaatgcccagttctctaagttcggaaagcagcacatcgaaaacctgttttccgatctgcaagatggccggcggctgctggacctgctggaggggctgaccggacagaagctgcctaaggagaaaggatctaccagggtccatgctctgaataacgtgaacaaggctctgagggtgctgcagaacaataacgtggacctggtgaacattggttccacagacatcgtggatggaaaccacaaactgacactgggactgatctggaacatcattctgcattggcaagtgaagaacgtgatgaagaacatcatggccggactgcagcagacgaactccgagaagatcctgcttagctgggtgagacagagtacccggaattacccacaggtgaacgtgatcaatttcacaaccagctggtcagacggcctggctctgaatgccctgattcatagccaccggccagatctgtttgactggaactctgtcgtgtgtcagcagtcagccacccagaggctggagcacgccttcaatattgcccgctatcagctggggattgagaaactgctggaccccgaggatgtggacacaacataccctgacaagaagagcatacttatgtatatcacaagcctgttccaggtgctgccacagcaggtctccatcgaggccattcaagaagtggagatgctgcccaggcctcctaaggtcaccaaagaggagcactttcagctccatcatcagatgcactacagccagcaaattaccgtgtccctggcccagggctacgagaggacaagttcccccaagcctagatttaagagctatgcctatacccaggccgcctacgtgactacctccgatcccaccaggagcccatttcccagccagcacctggaggctcccgaagataagagctttggcagcagcctgatggaatctgaggtgaacctggacagataccagactgcgctggaggaggtgctgtcctggctgctgagcgccgaggacaccctgcaggctcagggcgagattagtaatgatgtggaggtggtgaaggatcagtttcacactcacgaaggctacatgatggacctgaccgcccaccagggcagggtggggaacattctgcagctcgggagtaagctgatagggaccggcaaactgtccgaggatgaggaaaccgaggtgcaggagcagatgaacctgcttaactcccggtgggagtgtctgagagtggccagcatggagaagcagagcaatctgcacagagtgctgatggatctgcagaatcagaagctgaaggaactgaatgattggctcacaaagacagaggagaggactagaaagatggaggaggagcccctgggccctgacctggaggacctgaagcgacaggtgcagcagcacaaggtgctgcaggaggatctggagcaagaacaagtgagggtgaactctctgactcatatggttgtggtggtggacgagtcttccggagaccacgcaactgccgccctcgaggagcagctgaaggtgctgggcgataggtgggctaatatctgtaggtggaccgaggacagatgggtgctgctgcaggatatcctgctgaaatggcagcgcctgacagaagagcagtgtctgttcagcgcatggctgagcgaaaaggaggacgctgtgaacaagatccacactacaggatttaaagaccagaacgagatgctgagtagcctgcagaagctggctgtgctgaaggctgatttggagaaaaagaagcagagcatgggcaagctgtactccctgaaacaggacctgctgagcaccctgaagaataagtccgtgacccagaaaaccgaagcttggctggacaacttcgcgcgctgctgggataacctggtgcagaagctggagaagagcaccgcccagatttctcaagcagtgaccacaacccagcccagcctgacccagactacagtaatggagacagtcactaccgtgaccacccgggagcagatcctggtgaagcacgcccaggaagagctgccgcccccaccaccccagaaaaagcggaccctggagcgcctgcaggagctccaggaggccaccgacgaactggatctgaagctgaggcaggccgaggtgattaagggatcctggcagcctgtgggagacctgctgatcgacagcctgcaggatcatctggagaaagtcaaagctctgagaggggagatcgccccactgaaggagaacgtgagccacgtgaatgacctggctagacagctgaccaccttgggcattcagctgagtccttacaatctgtcaactctggaggatctgaacacccggtggaaactgctgcaggtggctgtggaagatcgggtgcgccagttacatgaggcccacagggactttggcccagcctcacagcactttctgtcaacctctgtgcaaggaccttgggagagagcaatcagcccaaacaaggtgccatattatatcaatcatgagactcagacaacttgctgggatcaccccaagatgacagaactctatcagtcactcgccgatctcaataatgtacggttctctgcctaccggacagctatgaagctgcggaggctgcagaaggcactctgtctggacctgctgagtctctctgcggcctgcgatgccctggatcaacataacctgaagcagaatgatcagcctatggacatcctgcagatcattaactgtctcaccacaatctacgatcggctggaacaggaacataacaacctggtgaatgtgccactgtgtgtggacatgtgcctgaattggctgctcaacgtctacgatacaggcaggactggcaggatccgcgtgctgagctttaaaaccggcatcatctctctgtgcaaagcccacctggaggacaaatatcggtacctgtttaagcaggtggcctccagcacaggcttctgtgatcagcgccggctgggcctgctgctgcacgacagcattcagatccctaggcagctgggcgaggtggcctccttcggcggctcaaacattgaacccagcgtgagatcttgctttcagtttgcaaataataaacccgagatcgaggccgccctgttcctggattggatgagactggagcctcagagtatggtgtggctgccagtgctgcatagagtggccgccgctgagacggccaagcaccaggcaaagtgcaatatctgcaaggaatgccccattattggctttcgataccggtccttgaaacacttcaattatgacatctgccagtcatgcttcttcagcggacgcgtggccaagggacacaagatgcattatcctatggtggaatactgcactccaactacttccggcgaggacgtgagagatttcgctaaagttcttaaaaacaaatttcggactaagaggtacttcgccaagcacccccgcatgggctatctgcctgtgcagacagtgcttgaaggagacaacatggaaaccgatacaatgtga

SEQ ID NO: 2407 - DNA, 3579 bp, synthetic construct
  source 1..3579: mol_type = other DNA
atgctgtggtgggaggaggtggaggattgctacgagagagaggacgtgcagaagaaaaccttcaccaaatgggtgaacgcccagttcagcaagtttggcaagcagcacatcgagaacctgttcagcgatctgcaggacggccgcaggctgctggatctgctggagggtctgaccggccagaaactgcccaaagagaagggatcaaccagggtgcacgccctgaataatgtgaacaaggccctgagagtgctgcaaaataataatgtggatctggtgaacatcggatctaccgatattgtggacggcaaccataagctgactctgggcctgatctggaatatcatcctgcactggcaggtgaaaaatgtgatgaaaaacatcatggccgggctgcagcagaccaactctgagaagatcctgctgagctgggtgaggcagtctacaagaaattacccccaggtgaacgtgatcaatttcaccaccagctggtccgacgggctggctctgaatgccctgattcacagccaccggcccgacctgttcgactggaattccgtggtgtgccagcagagcgccacacagagactggagcacgctttcaatatcgctcggtatcagctgggcatcgagaagctgctggaccccgaggacgtggacactacttaccccgataaaaagagcatcctgatgtatatcacctccctgttccaagtgctgccccagcaggtctccatcgaggccatccaggaggtggaaatgctgccccggcccccaaaggtgacaaaggaagaacacttccagctccaccaccagatgcactactctcagcagatcaccgtgagcctggcccaggggtacgagcggacctcttctccaaagccccgcttcaagagctatgcctatacccaggccgcctatgtgaccacctccgatcccacccgctcacccttcccttctcaacacctggaagccccagaggacaagtccttcggcagttctctgatggagtctgaggtgaacctggatagatatcagactgccctggaggaggtgctgtcttggctgctctccgccgaggacaccctgcaggcacagggcgagatctccaacgatgtggaggtggtgaaggaccagttccacacacacgagggctatatgatggacctgactgcccatcagggcagagtgggcaatatcctgcagctgggttccaaactgataggcaccggaaagctgagcgaagacgaggagaccgaggtgcaggagcagatgaatctgctgaactcccggtgggagtgcctgcgagtcgccagcatggaaaagcagagcaacctgcaccgcgtgctcatggatctgcagaatcagaagctgaaggagctgaatgactggctgaccaagaccgaagagcgcaccaggaagatggaggaggagccactgggccccgatctggaggacctgaaaagacaggtgcagcagcataaagtgctgcaggaggacctggagcaggaacaagtgagagtgaattctctgacacacatggtggtggtggtggacgagagcagcggcgaccacgcaacagccgccctggaggagcagctgaaagtgctgggagaccggtgggccaacatttgccggtggaccgaggaccgctgggtgctgctgcaggacattctgctgaagtggcagcggctgaccgaagagcagtgcctgttctccgcctggctgagcgagaaggaggacgccgtgaataagatccacaccaccgggttcaaggaccagaatgagatgctgtccagcctgcagaagctggccgtgctgaaggccgatctggaaaagaagaagcagagcatgggaaagctgtatagcctgaagcaggacctgctgtctactctgaaaaacaagtcagtgacccagaagaccgaggcctggctggacaacttcgcccgctgctgggacaacctggtgcagaagctggaaaagagcaccgcccagatcagccaggcagtgactaccacacagccctccctgacacagactactgtgatggagaccgtgacaacagtgaccacaagggagcagatcctggtgaagcacgcccaggaagaactgccccctccaccccctcagaagaagagaactctggaaagactgcaggagctgcaggaggccactgacgagctggacctgaagctgcggcaggccgaggtgattaagggcagctggcagcctgtgggcgatctgctgatcgacagcctgcaggaccacctggagaaggtgaaagccctgcggggcgagatcgcccctctgaaggagaacgtcagccatgtgaatgacctggccagacagctgaccacactggggattcagctgtctccttacaatctgtcaaccctggaggacctgaacactcgctggaagctgctgcaggtggccgtggaggacagggtgcggcagctgcacgaagcccatcgcgactttgggcccgcctctcagcactttctgagcacctccgtgcagggaccctgggagcgggcaatcagcccaaacaaggtgccatactacatcaaccacgagacccagaccacctgttgggatcaccccaagatgacagagctgtaccagtctctggctgacctgaacaacgtgcggttctcagcctacaggaccgccatgaagctgcggagactgcagaaggccctgtgcctggatctgctgagcctctccgctgcttgtgacgccctggatcagcacaacctgaaacagaacgaccagccaatggacatcctgcagattattaattgcctgacaaccatctatgatcggctggaacaggagcacaataatctggtgaacgtgccactgtgcgtggacatgtgcctgaattggctgctgaacgtgtacgacacaggacggaccggcagaatcagagtgctgtcttttaagaccgggatcatcagcctgtgcaaagcccacctggaggacaagtaccggtatctgttcaaacaagtggcctccagcaccggcttttgcgaccagcgcaggctgggcctgctgctccacgactccatccagatccctagacagctgggcgaggtggcttcttttggcggatccaatatcgagcccagtgtgcggagctgttttcagtttgctaataataagcctgagatcgaggccgctctgttcctggactggatgagactggagccccagtccatggtgtggctgccagtgctgcacagggtcgccgccgcagagactgccaagcaccaggccaagtgcaacatctgcaaagaatgcccaatcattggctttagataccggagcctcaaacactttaactacgacatctgccagagctgcttcttctccggccgggtggccaagggccacaagatgcactaccccatggtggagtactgtaccccaaccacttccggcgaggacgtgagagatttcgccaaggtgctgaagaacaagttccggacaaagagatactttgcaaaacacccaagaatgggctacctgccagtgcagaccgtgctggagggggacaatatggagacagacacaatgtga

SEQ ID NO: 2408 - DNA, 128 bp, synthetic construct
  source 1..128: mol_type = other DNA
gcgcgctcgctcgctcactgaggccgcccgggcaaagcccgggcgtcgggcgacctttggtcgcccggcctcagtgagcgagcgagcgcgcagagagggagtggccaactccatcactaggggttcct

SEQ ID NO: 2409 - DNA, 133 bp, synthetic construct
  source 1..133: mol_type = other DNA
gtaagtatcaaggttacaagacaggtttaaggagaccaatagaaactgggcttgtcgagacagagaagactcttgcgtttctgataggcacctattggtcttactgacatccactttgcctttctctccacag

SEQ ID NO: 2410 - DNA, 52 bp, synthetic construct
  source 1..52: mol_type = other DNA
aggaataaaatatctttattttcattacatctgtgtgttggttttttgtgtg

SEQ ID NO: 2411 - DNA, 128 bp, synthetic construct
  source 1..128: mol_type = other DNA
aggaacccctagtgatggagttggccactccctctctgcgcgctcgctcgctcactgaggccgggcgaccaaaggtcgcccgacgcccgggctttgcccgggcggcctcagtgagcgagcgagcgcgc

SEQ ID NO: 2412 - DNA, 4807 bp, synthetic construct
  source 1..4807: mol_type = other DNA
gcgcgctcgctcgctcactgaggccgcccgggcaaagcccgggcgtcgggcgacctttggtcgcccggcctcagtgagcgagcgagcgcgcagagagggagtggccaactccatcactaggggttccttagttattaatagtaatcaattacggggtcattagttcatagcccatatatggagttccgcgttacataacttacggtaaatggcccgcctggctgaccgcccaacgacccccgcccattgacgtcaataatgacgtatgttcccatagtaacgccaatagggactttccattgacgtcaatgggtggagtatttacggtaaactgcccacttggcagtacatcaagtgtatcatatgccaagtacgccccctattgacgtcaatgacggtaaatggcccgcctggcattatgcccagtacatgaccttatgggactttcctacttggcagtacatctacgtattagtcatcgctattaccatgctagactagcatgctgcccatgtaaggaggcaaggcctggggacacccgagatgcctggttataattaacccagacatgtggctgccccccccccccaacacctgctgcctctaaaaataaccctgcatgccatgttcccggcgaagggccagctgtcccccgccagctagactcagctctcaggggcccctccctggggacagcccctcctggctagtcacaccctgtaggctcctctatataacccaggggcacaggggctgccctcattctaccaccacctccacagcacagacagacactcaggagccagccagccagcccaggtacctgggcaggtaagtatcaaggttacaagacaggtttaaggagaccaatagaaactgggcttgtcgagacagagaagactcttgcgtttctgataggcacctattggtcttactgacatccactttgcctttctctccacaggtgtccagactagtgccaccatgctgtggtgggaggaagtggaggactgctacgagagagaggacgtgcagaagaagaccttcaccaagtgggtgaacgcccagttcagcaagttcggcaagcagcacatcgagaacctgttcagcgacctgcaggacggcagaagactgctggacctgctggagggcctgaccggccagaagctgcctaaggagaagggcagcaccagagtgcacgctctcaacaacgtgaacaaggccctgagagtgctgcagaacaacaacgtggaccttgtgaacatcggaagcaccgacatcgtggatggcaaccacaagctgaccctgggactgatctggaacatcatcctgcactggcaggtgaagaacgtcatgaagaacatcatggccggcctgcagcagaccaacagcgaaaagatcctgctgagctgggtcagacagagcaccagaaactaccctcaggtgaacgtgatcaacttcaccaccagctggagcgacggcctggccctgaacgccctgatccacagccacagacccgacctgttcgactggaacagcgtggtgtgccagcagagcgccacccagagactggagcacgccttcaacatcgccagataccagctgggcatcgagaagctgctggaccccgaggacgtggataccacctaccccgacaagaagagcatcctgatgtacatcaccagcctgttccaggtgctgccccagcaagtgagcatcgaggccatccaggaggtggagatgctgcccagacctccaaaggtgaccaaggaggagcacttccagctgcaccaccagatgcactacagccagcagatcaccgtgagcctggcccagggctacgagagaaccagcagccccaagcccagattcaagagctacgcctacacccaggccgcctacgtgaccaccagcgaccccaccagaagccccttccccagccagcacctggaggcccccgaggataagagcttcggcagcagcctgatggagagcgaggtgaacttggacagataccagaccgccctggaggaggtgctgagctggctgctgagcgccgaggacacccttcaggcacagggcgagatcagcaacgacgtggaggtggtgaaggaccagttccacacccacgagggctacatgatggacctgaccgcccaccagggcagagtgggtaacatcctccagctgggaagcaagctgatcggcaccggcaagctgagcgaggacgaggagaccgaggtgcaagagcaaatgaacctgcttaacagcagatgggagtgcctgagagtggccagcatggagaagcagagcaacctgcacagagtgctgatggacctgcagaaccagaagctgaaggagctgaacgactggctgaccaagaccgaggagagaaccagaaagatggaggaggagcccctgggcccggacctggaggacctgaagcggcaggtgcagcagcacaaggtcttacaggaggacctggagcaggagcaagtgagagtgaacagcctgacccacatggtggtggtggtggatgagagcagcggcgaccacgccaccgccgccctggaggagcagctgaaggtgctgggcgacagatgggccaacatctgcagatggaccgaggacagatgggttctgctgcaggacatcctgctgaagtggcagagactgaccgaggaacagtgcctgttcagcgcctggctgagtgagaaggaagacgctgtgaacaagatccacaccaccggcttcaaggaccagaacgagatgctgagcagcctgcagaagctggccgtgctgaaggcagacctggagaagaaaaagcagtccatgggaaagctgtacagcctgaagcaagacctgctgagcaccctgaagaacaagagcgtgacccagaagaccgaggcctggctggacaacttcgccagatgctgggacaacctggttcagaagctggagaagagcaccgcccagatcagccaggccgtgaccaccacccagcccagcctgacccagaccaccgtgatggagaccgtgaccaccgtgaccaccagagagcagatcctggtgaagcacgcccaggaggagctgccccctcctcccccgcaaaagaagagaaccctggagagactgcaggagctgcaggaggctaccgatgagctggacctgaagctgagacaggccgaggtgatcaagggcagctggcagcccgtgggtgacctgcttatcgacagcctgcaggaccacctagagaaggtgaaggccctgagaggcgagatcgcccctctgaaggagaacgtgagccacgtgaacgacctggccagacagctgaccaccctgggaatccagctgagcccctacaacctgagcaccctggaggacctgaacacgagatggaagctgctgcaagtggccgtggaggacagagtcagacagttgcacgaggctcacagagatttcggccccgctagtcagcacttcctgagcaccagcgtgcagggcccctgggagagagctatcagcccaaacaaggtgccctactacatcaaccacgagacccagaccacctgctgggaccaccccaagatgaccgagctgtaccagagcctggcagacctcaacaacgtgagattcagcgcctacagaaccgccatgaagctgagaagactgcagaaggccctgtgcctggacctgctgagcctgagcgccgcctgcgacgccctggaccagcacaacctgaagcagaacgaccagcccatggacatccttcagatcatcaactgcctgaccaccatctacgacagactggagcaggaacataacaacctggtgaacgtgcccctgtgcgtggacatgtgcctgaactggctgctgaacgtgtacgacaccggcagaacaggcagaatcagagtgctgagcttcaagaccggcatcatcagcctgtgcaaggcccacctggaggacaagtacagatacttattcaagcaggtggccagcagcaccggcttctgcgatcagagaagactgggcctgctgctgcacgacagcatccagatccccagacagctgggcgaagtggccagcttcggcggcagcaacatcgagcccagcgtgagaagctgcttccagttcgctaacaacaagcccgagatcgaggccgccctgttcttggactggatgagactggagccccagagcatggtgtggctgcccgtgctgcacagagtggccgccgccgagaccgccaagcaccaggccaagtgtaacatctgcaaggagtgcccaatcatcggcttcagatacagaagcctgaagcacttcaactacgacatctgccagagctgcttcttcagcggcagagtggccaagggccacaagatgcactaccccatggtggagtactgcacccccaccaccagcggcgaggacgtgagagacttcgcaaaggtcctgaagaacaagttcagaaccaagagatacttcgctaagcaccccagaatgggctacctgcccgtgcagaccgtgctggagggcgataacatggagaccgacaccatgtgatagattccaacaaaatcactgatgctggaagatcagcaacaaaatcactgatgctggaagacgcaggaataaaatatctttattttcattacatctgtgtgttggttttttgtgtgaggaacccctagtgatggagttggccactccctctctgcgcgctcgctcgctcactgaggccgggcgaccaaaggtcgcccgacgcccgggctttgcccgggcggcctcagtgagcgagcgagcgcgc

SEQ ID NO: 2413 - DNA, 4767 bp, synthetic construct
  source 1..4767: mol_type = other DNA
gcgcgctcgctcgctcactgaggccgcccgggcaaagcccgggcgtcgggcgacctttggtcgcccggcctcagtgagcgagcgagcgcgcagagagggagtggccaactccatcactaggggttcctcgtctgtctaattccagccaagggcatgggggaaaggacagagcccagggacctgtggcctattctctgagaggacgctgggctaataataggaggggagattagggagggatttgactgcattgttatctcacaggaatggcgtttgagagccttgcttccaagctcttccaagagtcatgccacccccctccaatctctgtggaagtgcccactgcctttcccgcttcgttctcttctctctaaatctgagcccaccccactcaggggtacaggatctggttcatttatctcccagaatgatgccttgggttgcgtcccctctaaactctggcacattccagcccctctttgggagaaagaacatctcttcttgcccaggccctagtgagacatgcatcgcaagacatgctccccccttcctccccgctgggctccagctgctgccagccctccaagaaaggagaggccctgagttgggctattttggtatctggggtgggcacccgcagggctaaggttaccttggtatgttaagggctccctggggcaggactatataaccccagagggactgccccatgctgactccttgcttctttcctgctcgagccgctgccttgccccccggagactgaagacacagcccaggtacctgggcaggtaagtatcaaggttacaagacaggtttaaggagaccaatagaaactgggcttgtcgagacagagaagactcttgcgtttctgataggcacctattggtcttactgacatccactttgcctttctctccacaggtgtccagactagtgccaccatgctgtggtgggaggaagtggaggactgctacgagagagaggacgtgcagaagaagaccttcaccaagtgggtgaacgcccagttcagcaagttcggcaagcagcacatcgagaacctgttcagcgacctgcaggacggcagaagactgctggacctgctggagggcctgaccggccagaagctgcctaaggagaagggcagcaccagagtgcacgctctcaacaacgtgaacaaggccctgagagtgctgcagaacaacaacgtggaccttgtgaacatcggaagcaccgacatcgtggatggcaaccacaagctgaccctgggactgatctggaacatcatcctgcactggcaggtgaagaacgtcatgaagaacatcatggccggcctgcagcagaccaacagcgaaaagatcctgctgagctgggtcagacagagcaccagaaactaccctcaggtgaacgtgatcaacttcaccaccagctggagcgacggcctggccctgaacgccctgatccacagccacagacccgacctgttcgactggaacagcgtggtgtgccagcagagcgccacccagagactggagcacgccttcaacatcgccagataccagctgggcatcgagaagctgctggaccccgaggacgtggataccacctaccccgacaagaagagcatcctgatgtacatcaccagcctgttccaggtgctgccccagcaagtgagcatcgaggccatccaggaggtggagatgctgcccagacctccaaaggtgaccaaggaggagcacttccagctgcaccaccagatgcactacagccagcagatcaccgtgagcctggcccagggctacgagagaaccagcagccccaagcccagattcaagagctacgcctacacccaggccgcctacgtgaccaccagcgaccccaccagaagccccttccccagccagcacctggaggcccccgaggataagagcttcggcagcagcctgatggagagcgaggtgaacttggacagataccagaccgccctggaggaggtgctgagctggctgctgagcgccgaggacacccttcaggcacagggcgagatcagcaacgacgtggaggtggtgaaggaccagttccacacccacgagggctacatgatggacctgaccgcccaccagggcagagtgggtaacatcctccagctgggaagcaagctgatcggcaccggcaagctgagcgaggacgaggagaccgaggtgcaagagcaaatgaacctgcttaacagcagatgggagtgcctgagagtggccagcatggagaagcagagcaacctgcacagagtgctgatggacctgcagaaccagaagctgaaggagctgaacgactggctgaccaagaccgaggagagaaccagaaagatggaggaggagcccctgggcccggacctggaggacctgaagcggcaggtgcagcagcacaaggtcttacaggaggacctggagcaggagcaagtgagagtgaacagcctgacccacatggtggtggtggtggatgagagcagcggcgaccacgccaccgccgccctggaggagcagctgaaggtgctgggcgacagatgggccaacatctgcagatggaccgaggacagatgggttctgctgcaggacatcctgctgaagtggcagagactgaccgaggaacagtgcctgttcagcgcctggctgagtgagaaggaagacgctgtgaacaagatccacaccaccggcttcaaggaccagaacgagatgctgagcagcctgcagaagctggccgtgctgaaggcagacctggagaagaaaaagcagtccatgggaaagctgtacagcctgaagcaagacctgctgagcaccctgaagaacaagagcgtgacccagaagaccgaggcctggctggacaacttcgccagatgctgggacaacctggttcagaagctggagaagagcaccgcccagatcagccaggccgtgaccaccacccagcccagcctgacccagaccaccgtgatggagaccgtgaccaccgtgaccaccagagagcagatcctggtgaagcacgcccaggaggagctgccccctcctcccccgcaaaagaagagaaccctggagagactgcaggagctgcaggaggctaccgatgagctggacctgaagctgagacaggccgaggtgatcaagggcagctggcagcccgtgggtgacctgcttatcgacagcctgcaggaccacctagagaaggtgaaggccctgagaggcgagatcgcccctctgaaggagaacgtgagccacgtgaacgacctggccagacagctgaccaccctgggaatccagctgagcccctacaacctgagcaccctggaggacctgaacacgagatggaagctgctgcaagtggccgtggaggacagagtcagacagttgcacgaggctcacagagatttcggccccgctagtcagcacttcctgagcaccagcgtgcagggcccctgggagagagctatcagcccaaacaaggtgccctactacatcaaccacgagacccagaccacctgctgggaccaccccaagatgaccgagctgtaccagagcctggcagacctcaacaacgtgagattcagcgcctacagaaccgccatgaagctgagaagactgcagaaggccctgtgcctggacctgctgagcctgagcgccgcctgcgacgccctggaccagcacaacctgaagcagaacgaccagcccatggacatccttcagatcatcaactgcctgaccaccatctacgacagactggagcaggaacataacaacctggtgaacgtgcccctgtgcgtggacatgtgcctgaactggctgctgaacgtgtacgacaccggcagaacaggcagaatcagagtgctgagcttcaagaccggcatcatcagcctgtgcaaggcccacctggaggacaagtacagatacttattcaagcaggtggccagcagcaccggcttctgcgatcagagaagactgggcctgctgctgcacgacagcatccagatccccagacagctgggcgaagtggccagcttcggcggcagcaacatcgagcccagcgtgagaagctgcttccagttcgctaacaacaagcccgagatcgaggccgccctgttcttggactggatgagactggagccccagagcatggtgtggctgcccgtgctgcacagagtggccgccgccgagaccgccaagcaccaggccaagtgtaacatctgcaaggagtgcccaatcatcggcttcagatacagaagcctgaagcacttcaactacgacatctgccagagctgcttcttcagcggcagagtggccaagggccacaagatgcactaccccatggtggagtactgcacccccaccaccagcggcgaggacgtgagagacttcgcaaaggtcctgaagaacaagttcagaaccaagagatacttcgctaagcaccccagaatgggctacctgcccgtgcagaccgtgctggagggcgataacatggagaccgacaccatgtgatagattccaacaaaatcactgatgctggaagatcagcaacaaaatcactgatgctggaagacgcaggaataaaatatctttattttcattacatctgtgtgttggttttttgtgtgaggaacccctagtgatggagttggccactccctctctgcgcgctcgctcgctcactgaggccgggcgaccaaaggtcgcccgacgcccgggctttgcccgggcggcctcagtgagcgagcgagcgcgc

SEQ ID NO: 2414 - DNA, 4767 bp, synthetic construct
  source 1..4767: mol_type = other DNA
gcgcgctcgctcgctcactgaggccgcccgggcaaagcccgggcgtcgggcgacctttggtcgcccggcctcagtgagcgagcgagcgcgcagagagggagtggccaactccatcactaggggttcctcgtctgtctaattccagccaagggcatgggggaaaggacagagcccagggacctgtggcctattctctgagaggacgctgggctaataataggaggggagattagggagggatttgactgcattgttatctcacaggaatggcgtttgagagccttgcttccaagctcttccaagagtcatgccacccccctccaatctctgtggaagtgcccactgcctttcccgcttcgttctcttctctcggtcccatccctgacccactagcctggtgccggggggagaccaatttctggaggaagctctgggtacccagtcttgccctaagcctgcctctgaacaggctgttcttgtttatgacccccgtcccagcagaatagtgattgctcatccctgcatgtgatttgagagggccagtctttcaggcctggaggaaactcaagccccaccagccgcttggcatcggaatgctcagctggtcccctcctggggctcatgtgaccaagatctagctataaatatcagaggggcctcagaccaagacagaattcgggcaccaggagaaggaagccaacaggatccgacccggtgttttgtgacaaaggcaagacccccaggtctacttagagcaacgttagtagaggacagcccaggtacctgggcaggtaagtatcaaggttacaagacaggtttaaggagaccaatagaaactgggcttgtcgagacagagaagactcttgcgtttctgataggcacctattggtcttactgacatccactttgcctttctctccacaggtgtccagactagtgccaccatgctgtggtgggaggaagtggaggactgctacgagagagaggacgtgcagaagaagaccttcaccaagtgggtgaacgcccagttcagcaagttcggcaagcagcacatcgagaacctgttcagcgacctgcaggacggcagaagactgctggacctgctggagggcctgaccggccagaagctgcctaaggagaagggcagcaccagagtgcacgctctcaacaacgtgaacaaggccctgagagtgctgcagaacaacaacgtggaccttgtgaacatcggaagcaccgacatcgtggatggcaaccacaagctgaccctgggactgatctggaacatcatcctgcactggcaggtgaagaacgtcatgaagaacatcatggccggcctgcagcagaccaacagcgaaaagatcctgctgagctgggtcagacagagcaccagaaactaccctcaggtgaacgtgatcaacttcaccaccagctggagcgacggcctggccctgaacgccctgatccacagccacagacccgacctgttcgactggaacagcgtggtgtgccagcagagcgccacccagagactggagcacgccttcaacatcgccagataccagctgggcatcgagaagctgctggaccccgaggacgtggataccacctaccccgacaagaagagcatcctgatgtacatcaccagcctgttccaggtgctgccccagcaagtgagcatcgaggccatccaggaggtggagatgctgcccagacctccaaaggtgaccaaggaggagcacttccagctgcaccaccagatgcactacagccagcagatcaccgtgagcctggcccagggctacgagagaaccagcagccccaagcccagattcaagagctacgcctacacccaggccgcctacgtgaccaccagcgaccccaccagaagccccttccccagccagcacctggaggcccccgaggataagagcttcggcagcagcctgatggagagcgaggtgaacttggacagataccagaccgccctggaggaggtgctgagctggctgctgagcgccgaggacacccttcaggcacagggcgagatcagcaacgacgtggaggtggtgaaggaccagttccacacccacgagggctacatgatggacctgaccgcccaccagggcagagtgggtaacatcctccagctgggaagcaagctgatcggcaccggcaagctgagcgaggacgaggagaccgaggtgcaagagcaaatgaacctgcttaacagcagatgggagtgcctgagagtggccagcatggagaagcagagcaacctgcacagagtgctgatggacctgcagaaccagaagctgaaggagctgaacgactggctgaccaagaccgaggagagaaccagaaagatggaggaggagcccctgggcccggacctggaggacctgaagcggcaggtgcagcagcacaaggtcttacaggaggacctggagcaggagcaagtgagagtgaacagcctgacccacatggtggtggtggtggatgagagcagcggcgaccacgccaccgccgccctggaggagcagctgaaggtgctgggcgacagatgggccaacatctgcagatggaccgaggacagatgggttctgctgcaggacatcctgctgaagtggcagagactgaccgaggaacagtgcctgttcagcgcctggctgagtgagaaggaagacgctgtgaacaagatccacaccaccggcttcaaggaccagaacgagatgctgagcagcctgcagaagctggccgtgctgaaggcagacctggagaagaaaaagcagtccatgggaaagctgtacagcctgaagcaagacctgctgagcaccctgaagaacaagagcgtgacccagaagaccgaggcctggctggacaacttcgccagatgctgggacaacctggttcagaagctggagaagagcaccgcccagatcagccaggccgtgaccaccacccagcccagcctgacccagaccaccgtgatggagaccgtgaccaccgtgaccaccagagagcagatcctggtgaagcacgcccaggaggagctgccccctcctcccccgcaaaagaagagaaccctggagagactgcaggagctgcaggaggctaccgatgagctggacctgaagctgagacaggccgaggtgatcaagggcagctggcagcccgtgggtgacctgcttatcgacagcctgcaggaccacctagagaaggtgaaggccctgagaggcgagatcgcccctctgaaggagaacgtgagccacgtgaacgacctggccagacagctgaccaccctgggaatccagctgagcccctacaacctgagcaccctggaggacctgaacacgagatggaagctgctgcaagtggccgtggaggacagagtcagacagttgcacgaggctcacagagatttcggccccgctagtcagcacttcctgagcaccagcgtgcagggcccctgggagagagctatcagcccaaacaaggtgccctactacatcaaccacgagacccagaccacctgctgggaccaccccaagatgaccgagctgtaccagagcctggcagacctcaacaacgtgagattcagcgcctacagaaccgccatgaagctgagaagactgcagaaggccctgtgcctggacctgctgagcctgagcgccgcctgcgacgccctggaccagcacaacctgaagcagaacgaccagcccatggacatccttcagatcatcaactgcctgaccaccatctacgacagactggagcaggaacataacaacctggtgaacgtgcccctgtgcgtggacatgtgcctgaactggctgctgaacgtgtacgacaccggcagaacaggcagaatcagagtgctgagcttcaagaccggcatcatcagcctgtgcaaggcccacctggaggacaagtacagatacttattcaagcaggtggccagcagcaccggcttctgcgatcagagaagactgggcctgctgctgcacgacagcatccagatccccagacagctgggcgaagtggccagcttcggcggcagcaacatcgagcccagcgtgagaagctgcttccagttcgctaacaacaagcccgagatcgaggccgccctgttcttggactggatgagactggagccccagagcatggtgtggctgcccgtgctgcacagagtggccgccgccgagaccgccaagcaccaggccaagtgtaacatctgcaaggagtgcccaatcatcggcttcagatacagaagcctgaagcacttcaactacgacatctgccagagctgcttcttcagcggcagagtggccaagggccacaagatgcactaccccatggtggagtactgcacccccaccaccagcggcgaggacgtgagagacttcgcaaaggtcctgaagaacaagttcagaaccaagagatacttcgctaagcaccccagaatgggctacctgcccgtgcagaccgtgctggagggcgataacatggagaccgacaccatgtgatagattccaacaaaatcactgatgctggaagatcagcaacaaaatcactgatgctggaagacgcaggaataaaatatctttattttcattacatctgtgtgttggttttttgtgtgaggaacccctagtgatggagttggccactccctctctgcgcgctcgctcgctcactgaggccgggcgaccaaaggtcgcccgacgcccgggctttgcccgggcggcctcagtgagcgagcgagcgcgc

SEQ ID NO: 2415 - DNA, 4809 bp, synthetic construct
  source 1..4809: mol_type = other DNA
gcgcgctcgctcgctcactgaggccgcccgggcaaagcccgggcgtcgggcgacctttggtcgcccggcctcagtgagcgagcgagcgcgcagagagggagtggccaactccatcactaggggttccttagttattaatagtaatcaattacggggtcattagttcatagcccatatatggagttccgcgttacataacttacggtaaatggcccgcctggctgaccgcccaacgacccccgcccattgacgtcaataatgacgtatgttcccatagtaacgccaatagggactttccattgacgtcaatgggtggagtatttacggtaaactgcccacttggcagtacatcaagtgtatcatatgccaagtacgccccctattgacgtcaatgacggtaaatggcccgcctggcattatgcccagtacatgaccttatgggactttcctacttggcagtacatctacgtattagtcatcgctattaccatgctagactagcatgctgcccatgtaaggaggcaaggcctggggacacccgagatgcctggttataattaacccagacatgtggctgccccccccccccaacacctgctgcctctaaaaataaccctgcatgccatgttcccggcgaagggccagctgtcccccgccagctagactcagctctcaggggcccctccctggggacagcccctcctggctagtcacaccctgtaggctcctctatataacccaggggcacaggggctgccctcattctaccaccacctccacagcacagacagacactcaggagccagccagccagcccaggtacctgggcaggtaagtatcaaggttacaagacaggtttaaggagaccaatagaaactgggcttgtcgagacagagaagactcttgcgtttctgataggcacctattggtcttactgacatccactttgcctttctctccacaggtgtccagactagtgccaccatgctgtggtgggaggaagtggaggactgctacgagagagaggacgtgcagaagaagaccttcaccaagtgggtgaacgcccagttcagcaagttcggcaagcagcacatcgagaacctgttcagcgacctgcaggacggcagaagactgctggacctgctggagggcctgaccggccagaagctgcctaaggagaagggcagcaccagagtgcacgctctcaacaacgtgaacaaggccctgagagtgctgcagaacaacaacgtggaccttgtgaacatcggaagcaccgacatcgtggatggcaaccacaagctgaccctgggactgatctggaacatcatcctgcactggcaggtgaagaacgtcatgaagaacatcatggccggcctgcagcagaccaacagcgaaaagatcctgctgagctgggtcagacagagcaccagaaactaccctcaggtgaacgtgatcaacttcaccaccagctggagcgacggcctggccctgaacgccctgatccacagccacagacccgacctgttcgactggaacagcgtggtgtgccagcagagcgccacccagagactggagcacgccttcaacatcgccagataccagctgggcatcgagaagctgctggaccccgaggacgtggataccacctaccccgacaagaagagcatcctgatgtacatcaccagcctgttccaggtgctgccccagcaagtgagcatcgaggccatccaggaggtggagatgctgcccagacctccaaaggtgaccaaggaggagcacttccagctgcaccaccagatgcactacagccagcagatcaccgtgagcctggcccagggctacgagagaaccagcagccccaagcccagattcaagagctacgcctacacccaggccgcctacgtgaccaccagcgaccccaccagaagccccttccccagccagcacctggaggcccccgaggataagagcttcggcagcagcctgatggagagcgaggtgaacttggacagataccagaccgccctggaggaggtgctgagctggctgctgagcgccgaggacacccttcaggcacagggcgagatcagcaacgacgtggaggtggtgaaggaccagttccacacccacgagggctacatgatggacctgaccgcccaccagggcagagtgggtaacatcctccagctgggaagcaagctgatcggcaccggcaagctgagcgaggacgaggagaccgaggtgcaagagcaaatgaacctgcttaacagcagatgggagtgcctgagagtggccagcatggagaagcagagcaacctgcacagagtgctgatggacctgcagaaccagaagctgaaggagctgaacgactggctgaccaagaccgaggagagaaccagaaagatggaggaggagcccctgggcccggacctggaggacctgaagcggcaggtgcagcagcacaaggtcttacaggaggacctggagcaggagcaagtgagagtgaacagcctgacccacatggtggtggtggtggatgagagcagcggcgaccacgccaccgccgccctggaggagcagctgaaggtgctgggcgacagatgggccaacatctgcagatggaccgaggacagatgggttctgctgcaggacatcctgctgaagtggcagagactgaccgaggaacagtgcctgttcagcgcctggctgagtgagaaggaagacgctgtgaacaagatccacaccaccggcttcaaggaccagaacgagatgctgagcagcctgcagaagctggccgtgctgaaggcagacctggagaagaaaaagcagtccatgggaaagctgtacagcctgaagcaagacctgctgagcaccctgaagaacaagagcgtgacccagaagaccgaggcctggctggacaacttcgccagatgctgggacaacctggttcagaagctggagaagagcaccgcccagatcagccaggccgtgaccaccacccagcccagcctgacccagaccaccgtgatggagaccgtgaccaccgtgaccaccagagagcagatcctggtgaagcacgcccaggaggagctgccccctcctcccccgcaaaagaagagaaccctggagagactgcaggagctgcaggaggctaccgatgagctggacctgaagctgagacaggccgaggtgatcaagggcagctggcagcccgtgggtgacctgcttatcgacagcctgcaggaccacctagagaaggtgaaggccctgagaggcgagatcgcccctctgaaggagaacgtgagccacgtgaacgacctggccagacagctgaccaccctgggaatccagctgagcccctacaacctgagcaccctggaggacctgaacacgagatggaagctgctgcaagtggccgtggaggacagagtcagacagttgcacgaggctcacagagatttcggccccgctagtcagcacttcctgagcaccagcgtgcagggcccctgggagagagctatcagcccaaacaaggtgccctactacatcaaccacgagacccagaccacctgctgggaccaccccaagatgaccgagctgtaccagagcctggcagacctcaacaacgtgagattcagcgcctacagaaccgccatgaagctgagaagactgcagaaggccctgtgcctggacctgctgagcctgagcgccgcctgcgacgccctggaccagcacaacctgaagcagaacgaccagcccatggacatccttcagatcatcaactgcctgaccaccatctacgacagactggagcaggaacataacaacctggtgaacgtgcccctgtgcgtggacatgtgcctgaactggctgctgaacgtgtacgacaccggcagaacaggcagaatcagagtgctgagcttcaagaccggcatcatcagcctgtgcaaggcccacctggaggacaagtacagatacttattcaagcaggtggccagcagcaccggcttctgcgatcagagaagactgggcctgctgctgcacgacagcatccagatccccagacagctgggcgaagtggccagcttcggcggcagcaacatcgagcccagcgtgagaagctgcttccagttcgctaacaacaagcccgagatcgaggccgccctgttcttggactggatgagactggagccccagagcatggtgtggctgcccgtgctgcacagagtggccgccgccgagaccgccaagcaccaggccaagtgtaacatctgcaaggagtgcccaatcatcggcttcagatacagaagcctgaagcacttcaactacgacatctgccagagctgcttcttcagcggcagagtggccaagggccacaagatgcactaccccatggtggagtactgcacccccaccaccagcggcgaggacgtgagagacttcgcaaaggtcctgaagaacaagttcagaaccaagagatacttcgctaagcaccccagaatgggctacctgcccgtgcagaccgtgctggagggcgataacatggagaccgacaccatgtgatagattccggcctgattcacaacaccagctagatcagcggcctgattcacaacaccagctagacgcaggaataaaatatctttattttcattacatctgtgtgttggttttttgtgtgaggaacccctagtgatggagttggccactccctctctgcgcgctcgctcgctcactgaggccgggcgaccaaaggtcgcccgacgcccgggctttgcccgggcggcctcagtgagcgagcgagcgcgc

SEQ ID NO: 2416 - DNA, 4769 bp, synthetic construct
  source 1..4769: mol_type = other DNA
gcgcgctcgctcgctcactgaggccgcccgggcaaagcccgggcgtcgggcgacctttggtcgcccggcctcagtgagcgagcgagcgcgcagagagggagtggccaactccatcactaggggttcctcgtctgtctaattccagccaagggcatgggggaaaggacagagcccagggacctgtggcctattctctgagaggacgctgggctaataataggaggggagattagggagggatttgactgcattgttatctcacaggaatggcgtttgagagccttgcttccaagctcttccaagagtcatgccacccccctccaatctctgtggaagtgcccactgcctttcccgcttcgttctcttctctctaaatctgagcccaccccactcaggggtacaggatctggttcatttatctcccagaatgatgccttgggttgcgtcccctctaaactctggcacattccagcccctctttgggagaaagaacatctcttcttgcccaggccctagtgagacatgcatcgcaagacatgctccccccttcctccccgctgggctccagctgctgccagccctccaagaaaggagaggccctgagttgggctattttggtatctggggtgggcacccgcagggctaaggttaccttggtatgttaagggctccctggggcaggactatataaccccagagggactgccccatgctgactccttgcttctttcctgctcgagccgctgccttgccccccggagactgaagacacagcccaggtacctgggcaggtaagtatcaaggttacaagacaggtttaaggagaccaatagaaactgggcttgtcgagacagagaagactcttgcgtttctgataggcacctattggtcttactgacatccactttgcctttctctccacaggtgtccagactagtgccaccatgctgtggtgggaggaagtggaggactgctacgagagagaggacgtgcagaagaagaccttcaccaagtgggtgaacgcccagttcagcaagttcggcaagcagcacatcgagaacctgttcagcgacctgcaggacggcagaagactgctggacctgctggagggcctgaccggccagaagctgcctaaggagaagggcagcaccagagtgcacgctctcaacaacgtgaacaaggccctgagagtgctgcagaacaacaacgtggaccttgtgaacatcggaagcaccgacatcgtggatggcaaccacaagctgaccctgggactgatctggaacatcatcctgcactggcaggtgaagaacgtcatgaagaacatcatggccggcctgcagcagaccaacagcgaaaagatcctgctgagctgggtcagacagagcaccagaaactaccctcaggtgaacgtgatcaacttcaccaccagctggagcgacggcctggccctgaacgccctgatccacagccacagacccgacctgttcgactggaacagcgtggtgtgccagcagagcgccacccagagactggagcacgccttcaacatcgccagataccagctgggcatcgagaagctgctggaccccgaggacgtggataccacctaccccgacaagaagagcatcctgatgtacatcaccagcctgttccaggtgctgccccagcaagtgagcatcgaggccatccaggaggtggagatgctgcccagacctccaaaggtgaccaaggaggagcacttccagctgcaccaccagatgcactacagccagcagatcaccgtgagcctggcccagggctacgagagaaccagcagccccaagcccagattcaagagctacgcctacacccaggccgcctacgtgaccaccagcgaccccaccagaagccccttccccagccagcacctggaggcccccgaggataagagcttcggcagcagcctgatggagagcgaggtgaacttggacagataccagaccgccctggaggaggtgctgagctggctgctgagcgccgaggacacccttcaggcacagggcgagatcagcaacgacgtggaggtggtgaaggaccagttccacacccacgagggctacatgatggacctgaccgcccaccagggcagagtgggtaacatcctccagctgggaagcaagctgatcggcaccggcaagctgagcgaggacgaggagaccgaggtgcaagagcaaatgaacctgcttaacagcagatgggagtgcctgagagtggccagcatggagaagcagagcaacctgcacagagtgctgatggacctgcagaaccagaagctgaaggagctgaacgactggctgaccaagaccgaggagagaaccagaaagatggaggaggagcccctgggcccggacctggaggacctgaagcggcaggtgcagcagcacaaggtcttacaggaggacctggagcaggagcaagtgagagtgaacagcctgacccacatggtggtggtggtggatgagagcagcggcgaccacgccaccgccgccctggaggagcagctgaaggtgctgggcgacagatgggccaacatctgcagatggaccgaggacagatgggttctgctgcaggacatcctgctgaagtggcagagactgaccgaggaacagtgcctgttcagcgcctggctgagtgagaaggaagacgctgtgaacaagatccacaccaccggcttcaaggaccagaacgagatgctgagcagcctgcagaagctggccgtgctgaaggcagacctggagaagaaaaagcagtccatgggaaagctgtacagcctgaagcaagacctgctgagcaccctgaagaacaagagcgtgacccagaagaccgaggcctggctggacaacttcgccagatgctgggacaacctggttcagaagctggagaagagcaccgcccagatcagccaggccgtgaccaccacccagcccagcctgacccagaccaccgtgatggagaccgtgaccaccgtgaccaccagagagcagatcctggtgaagcacgcccaggaggagctgccccctcctcccccgcaaaagaagagaaccctggagagactgcaggagctgcaggaggctaccgatgagctggacctgaagctgagacaggccgaggtgatcaagggcagctggcagcccgtgggtgacctgcttatcgacagcctgcaggaccacctagagaaggtgaaggccctgagaggcgagatcgcccctctgaaggagaacgtgagccacgtgaacgacctggccagacagctgaccaccctgggaatccagctgagcccctacaacctgagcaccctggaggacctgaacacgagatggaagctgctgcaagtggccgtggaggacagagtcagacagttgcacgaggctcacagagatttcggccccgctagtcagcacttcctgagcaccagcgtgcagggcccctgggagagagctatcagcccaaacaaggtgccctactacatcaaccacgagacccagaccacctgctgggaccaccccaagatgaccgagctgtaccagagcctggcagacctcaacaacgtgagattcagcgcctacagaaccgccatgaagctgagaagactgcagaaggccctgtgcctggacctgctgagcctgagcgccgcctgcgacgccctggaccagcacaacctgaagcagaacgaccagcccatggacatccttcagatcatcaactgcctgaccaccatctacgacagactggagcaggaacataacaacctggtgaacgtgcccctgtgcgtggacatgtgcctgaactggctgctgaacgtgtacgacaccggcagaacaggcagaatcagagtgctgagcttcaagaccggcatcatcagcctgtgcaaggcccacctggaggacaagtacagatacttattcaagcaggtggccagcagcaccggcttctgcgatcagagaagactgggcctgctgctgcacgacagcatccagatccccagacagctgggcgaagtggccagcttcggcggcagcaacatcgagcccagcgtgagaagctgcttccagttcgctaacaacaagcccgagatcgaggccgccctgttcttggactggatgagactggagccccagagcatggtgtggctgcccgtgctgcacagagtggccgccgccgagaccgccaagcaccaggccaagtgtaacatctgcaaggagtgcccaatcatcggcttcagatacagaagcctgaagcacttcaactacgacatctgccagagctgcttcttcagcggcagagtggccaagggccacaagatgcactaccccatggtggagtactgcacccccaccaccagcggcgaggacgtgagagacttcgcaaaggtcctgaagaacaagttcagaaccaagagatacttcgctaagcaccccagaatgggctacctgcccgtgcagaccgtgctggagggcgataacatggagaccgacaccatgtgatagattccggcctgattcacaacaccagctagatcagcggcctgattcacaacaccagctagacgcaggaataaaatatctttattttcattacatctgtgtgttggttttttgtgtgaggaacccctagtgatggagttggccactccctctctgcgcgctcgctcgctcactgaggccgggcgaccaaaggtcgcccgacgcccgggctttgcccgggcggcctcagtgagcgagcgagcgcgc

SEQ ID NO: 2417 - DNA, 4769 bp, synthetic construct
  source 1..4769: mol_type = other DNA
gcgcgctcgctcgctcactgaggccgcccgggcaaagcccgggcgtcgggcgacctttggtcgcccggcctcagtgagcgagcgagcgcgcagagagggagtggccaactccatcactaggggttcctcgtctgtctaattccagccaagggcatgggggaaaggacagagcccagggacctgtggcctattctctgagaggacgctgggctaataataggaggggagattagggagggatttgactgcattgttatctcacaggaatggcgtttgagagccttgcttccaagctcttccaagagtcatgccacccccctccaatctctgtggaagtgcccactgcctttcccgcttcgttctcttctctcggtcccatccctgacccactagcctggtgccggggggagaccaatttctggaggaagctctgggtacccagtcttgccctaagcctgcctctgaacaggctgttcttgtttatgacccccgtcccagcagaatagtgattgctcatccctgcatgtgatttgagagggccagtctttcaggcctggaggaaactcaagccccaccagccgcttggcatcggaatgctcagctggtcccctcctggggctcatgtgaccaagatctagctataaatatcagaggggcctcagaccaagacagaattcgggcaccaggagaaggaagccaacaggatccgacccggtgttttgtgacaaaggcaagacccccaggtctacttagagcaacgttagtagaggacagcccaggtacctgggcaggtaagtatcaaggttacaagacaggtttaaggagaccaatagaaactgggcttgtcgagacagagaagactcttgcgtttctgataggcacctattggtcttactgacatccactttgcctttctctccacaggtgtccagactagtgccaccatgctgtggtgggaggaagtggaggactgctacgagagagaggacgtgcagaagaagaccttcaccaagtgggtgaacgcccagttcagcaagttcggcaagcagcacatcgagaacctgttcagcgacctgcaggacggcagaagactgctggacctgctggagggcctgaccggccagaagctgcctaaggagaagggcagcaccagagtgcacgctctcaacaacgtgaacaaggccctgagagtgctgcagaacaacaacgtggaccttgtgaacatcggaagcaccgacatcgtggatggcaaccacaagctgaccctgggactgatctggaacatcatcctgcactggcaggtgaagaacgtcatgaagaacatcatggccggcctgcagcagaccaacagcgaaaagatcctgctgagctgggtcagacagagcaccagaaactaccctcaggtgaacgtgatcaacttcaccaccagctggagcgacggcctggccctgaacgccctgatccacagccacagacccgacctgttcgactggaacagcgtggtgtgccagcagagcgccacccagagactggagcacgccttcaacatcgccagataccagctgggcatcgagaagctgctggaccccgaggacgtggataccacctaccccgacaagaagagcatcctgatgtacatcaccagcctgttccaggtgctgccccagcaagtgagcatcgaggccatccaggaggtggagatgctgcccagacctccaaaggtgaccaaggaggagcacttccagctgcaccaccagatgcactacagccagcagatcaccgtgagcctggcccagggctacgagagaaccagcagccccaagcccagattcaagagctacgcctacacccaggccgcctacgtgaccaccagcgaccccaccagaagccccttccccagccagcacctggaggcccccgaggataagagcttcggcagcagcctgatggagagcgaggtgaacttggacagataccagaccgccctggaggaggtgctgagctggctgctgagcgccgaggacacccttcaggcacagggcgagatcagcaacgacgtggaggtggtgaaggaccagttccacacccacgagggctacatgatggacctgaccgcccaccagggcagagtgggtaacatcctccagctgggaagcaagctgatcggcaccggcaagctgagcgaggacgaggagaccgaggtgcaagagcaaatgaacctgcttaacagcagatgggagtgcctgagagtggccagcatggagaagcagagcaacctgcacagagtgctgatggacctgcagaaccagaagctgaaggagctgaacgactggctgaccaagaccgaggagagaaccagaaagatggaggaggagcccctgggcccggacctggaggacctgaagcggcaggtgcagcagcacaaggtcttacaggaggacctggagcaggagcaagtgagagtgaacagcctgacccacatggtggtggtggtggatgagagcagcggcgaccacgccaccgccgccctggaggagcagctgaaggtgctgggcgacagatgggccaacatctgcagatggaccgaggacagatgggttctgctgcaggacatcctgctgaagtggcagagactgaccgaggaacagtgcctgttcagcgcctggctgagtgagaaggaagacgctgtgaacaagatccacaccaccggcttcaaggaccagaacgagatgctgagcagcctgcagaagctggccgtgctgaaggcagacctggagaagaaaaagcagtccatgggaaagctgtacagcctgaagcaagacctgctgagcaccctgaagaacaagagcgtgacccagaagaccgaggcctggctggacaacttcgccagatgctgggacaacctggttcagaagctggagaagagcaccgcccagatcagccaggccgtgaccaccacccagcccagcctgacccagaccaccgtgatggagaccgtgaccaccgtgaccaccagagagcagatcctggtgaagcacgcccaggaggagctgccccctcctcccccgcaaaagaagagaaccctggagagactgcaggagctgcaggaggctaccgatgagctggacctgaagctgagacaggccgaggtgatcaagggcagctggcagcccgtgggtgacctgcttatcgacagcctgcaggaccacctagagaaggtgaaggccctgagaggcgagatcgcccctctgaaggagaacgtgagccacgtgaacgacctggccagacagctgaccaccctgggaatccagctgagcccctacaacctgagcaccctggaggacctgaacacgagatggaagctgctgcaagtggccgtggaggacagagtcagacagttgcacgaggctcacagagatttcggccccgctagtcagcacttcctgagcaccagcgtgcagggcccctgggagagagctatcagcccaaacaaggtgccctactacatcaaccacgagacccagaccacctgctgggaccaccccaagatgaccgagctgtaccagagcctggcagacctcaacaacgtgagattcagcgcctacagaaccgccatgaagctgagaagactgcagaaggccctgtgcctggacctgctgagcctgagcgccgcctgcgacgccctggaccagcacaacctgaagcagaacgaccagcccatggacatccttcagatcatcaactgcctgaccaccatctacgacagactggagcaggaacataacaacctggtgaacgtgcccctgtgcgtggacatgtgcctgaactggctgctgaacgtgtacgacaccggcagaacaggcagaatcagagtgctgagcttcaagaccggcatcatcagcctgtgcaaggcccacctggaggacaagtacagatacttattcaagcaggtggccagcagcaccggcttctgcgatcagagaagactgggcctgctgctgcacgacagcatccagatccccagacagctgggcgaagtggccagcttcggcggcagcaacatcgagcccagcgtgagaagctgcttccagttcgctaacaacaagcccgagatcgaggccgccctgttcttggactggatgagactggagccccagagcatggtgtggctgcccgtgctgcacagagtggccgccgccgagaccgccaagcaccaggccaagtgtaacatctgcaaggagtgcccaatcatcggcttcagatacagaagcctgaagcacttcaactacgacatctgccagagctgcttcttcagcggcagagtggccaagggccacaagatgcactaccccatggtggagtactgcacccccaccaccagcggcgaggacgtgagagacttcgcaaaggtcctgaagaacaagttcagaaccaagagatacttcgctaagcaccccagaatgggctacctgcccgtgcagaccgtgctggagggcgataacatggagaccgacaccatgtgatagattccggcctgattcacaacaccagctagatcagcggcctgattcacaacaccagctagacgcaggaataaaatatctttattttcattacatctgtgtgttggttttttgtgtgaggaacccctagtgatggagttggccactccctctctgcgcgctcgctcgctcactgaggccgggcgaccaaaggtcgcccgacgcccgggctttgcccgggcggcctcagtgagcgagcgagcgcgc

SEQ ID NO: 2418 - DNA, 4809 bp, synthetic construct
  source 1..4809: mol_type = other DNA
gcgcgctcgctcgctcactgaggccgcccgggcaaagcccgggcgtcgggcgacctttggtcgcccggcctcagtgagcgagcgagcgcgcagagagggagtggccaactccatcactaggggttccttagttattaatagtaatcaattacggggtcattagttcatagcccatatatggagttccgcgttacataacttacggtaaatggcccgcctggctgaccgcccaacgacccccgcccattgacgtcaataatgacgtatgttcccatagtaacgccaatagggactttccattgacgtcaatgggtggagtatttacggtaaactgcccacttggcagtacatcaagtgtatcatatgccaagtacgccccctattgacgtcaatgacggtaaatggcccgcctggcattatgcccagtacatgaccttatgggactttcctacttggcagtacatctacgtattagtcatcgctattaccatgctagactagcatgctgcccatgtaaggaggcaaggcctggggacacccgagatgcctggttataattaacccagacatgtggctgccccccccccccaacacctgctgcctctaaaaataaccctgcatgccatgttcccggcgaagggccagctgtcccccgccagctagactcagctctcaggggcccctccctggggacagcccctcctggctagtcacaccctgtaggctcctctatataacccaggggcacaggggctgccctcattctaccaccacctccacagcacagacagacactcaggagccagccagccagcccaggtacctgggcaggtaagtatcaaggttacaagacaggtttaaggagaccaatagaaactgggcttgtcgagacagagaagactcttgcgtttctgataggcacctattggtcttactgacatccactttgcctttctctccacaggtgtccagactagtgccaccatgctgtggtgggaggaagtggaggactgctacgagagagaggacgtgcagaagaagaccttcaccaagtgggtgaacgcccagttcagcaagttcggcaagcagcacatcgagaacctgttcagcgacctgcaggacggcagaagactgctggacctgctggagggcctgaccggccagaagctgcctaaggagaagggcagcaccagagtgcacgctctcaacaacgtgaacaaggccctgagagtgctgcagaacaacaacgtggaccttgtgaacatcggaagcaccgacatcgtggatggcaaccacaagctgaccctgggactgatctggaacatcatcctgcactggcaggtgaagaacgtcatgaagaacatcatggccggcctgcagcagaccaacagcgaaaagatcctgctgagctgggtcagacagagcaccagaaactaccctcaggtgaacgtgatcaacttcaccaccagctggagcgacggcctggccctgaacgccctgatccacagccacagacccgacctgttcgactggaacagcgtggtgtgccagcagagcgccacccagagactggagcacgccttcaacatcgccagataccagctgggcatcgagaagctgctggaccccgaggacgtggataccacctaccccgacaagaagagcatcctgatgtacatcaccagcctgttccaggtgctgccccagcaagtgagcatcgaggccatccaggaggtggagatgctgcccagacctccaaaggtgaccaaggaggagcacttccagctgcaccaccagatgcactacagccagcagatcaccgtgagcctggcccagggctacgagagaaccagcagccccaagcccagattcaagagctacgcctacacccaggccgcctacgtgaccaccagcgaccccaccagaagccccttccccagccagcacctggaggcccccgaggataagagcttcggcagcagcctgatggagagcgaggtgaacttggacagataccagaccgccctggaggaggtgctgagctggctgctgagcgccgaggacacccttcaggcacagggcgagatcagcaacgacgtggaggtggtgaaggaccagttccacacccacgagggctacatgatggacctgaccgcccaccagggcagagtgggtaacatcctccagctgggaagcaagctgatcggcaccggcaagctgagcgaggacgaggagaccgaggtgcaagagcaaatgaacctgcttaacagcagatgggagtgcctgagagtggccagcatggagaagcagagcaacctgcacagagtgctgatggacctgcagaaccagaagctgaaggagctgaacgactggctgaccaagaccgaggagagaaccagaaagatggaggaggagcccctgggcccggacctggaggacctgaagcggcaggtgcagcagcacaaggtcttacaggaggacctggagcaggagcaagtgagagtgaacagcctgacccacatggtggtggtggtggatgagagcagcggcgaccacgccaccgccgccctggaggagcagctgaaggtgctgggcgacagatgggccaacatctgcagatggaccgaggacagatgggttctgctgcaggacatcctgctgaagtggcagagactgaccgaggaacagtgcctgttcagcgcctggctgagtgagaaggaagacgctgtgaacaagatccacaccaccggcttcaaggaccagaacgagatgctgagcagcctgcagaagctggccgtgctgaaggcagacctggagaagaaaaagcagtccatgggaaagctgtacagcctgaagcaagacctgctgagcaccctgaagaacaagagcgtgacccagaagaccgaggcctggctggacaacttcgccagatgctgggacaacctggttcagaagctggagaagagcaccgcccagatcagccaggccgtgaccaccacccagcccagcctgacccagaccaccgtgatggagaccgtgaccaccgtgaccaccagagagcagatcctggtgaagcacgcccaggaggagctgccccctcctcccccgcaaaagaagagaaccctggagagactgcaggagctgcaggaggctaccgatgagctggacctgaagctgagacaggccgaggtgatcaagggcagctggcagcccgtgggtgacctgcttatcgacagcctgcaggaccacctagagaaggtgaaggccctgagaggcgagatcgcccctctgaaggagaacgtgagccacgtgaacgacctggccagacagctgaccaccctgggaatccagctgagcccctacaacctgagcaccctggaggacctgaacacgagatggaagctgctgcaagtggccgtggaggacagagtcagacagttgcacgaggctcacagagatttcggccccgctagtcagcacttcctgagcaccagcgtgcagggcccctgggagagagctatcagcccaaacaaggtgccctactacatcaaccacgagacccagaccacctgctgggaccaccccaagatgaccgagctgtaccagagcctggcagacctcaacaacgtgagattcagcgcctacagaaccgccatgaagctgagaagactgcagaaggccctgtgcctggacctgctgagcctgagcgccgcctgcgacgccctggaccagcacaacctgaagcagaacgaccagcccatggacatccttcagatcatcaactgcctgaccaccatctacgacagactggagcaggaacataacaacctggtgaacgtgcccctgtgcgtggacatgtgcctgaactggctgctgaacgtgtacgacaccggcagaacaggcagaatcagagtgctgagcttcaagaccggcatcatcagcctgtgcaaggcccacctggaggacaagtacagatacttattcaagcaggtggccagcagcaccggcttctgcgatcagagaagactgggcctgctgctgcacgacagcatccagatccccagacagctgggcgaagtggccagcttcggcggcagcaacatcgagcccagcgtgagaagctgcttccagttcgctaacaacaagcccgagatcgaggccgccctgttcttggactggatgagactggagccccagagcatggtgtggctgcccgtgctgcacagagtggccgccgccgagaccgccaagcaccaggccaagtgtaacatctgcaaggagtgcccaatcatcggcttcagatacagaagcctgaagcacttcaactacgacatctgccagagctgcttcttcagcggcagagtggccaagggccacaagatgcactaccccatggtggagtactgcacccccaccaccagcggcgaggacgtgagagacttcgcaaaggtcctgaagaacaagttcagaaccaagagatacttcgctaagcaccccagaatgggctacctgcccgtgcagaccgtgctggagggcgataacatggagaccgacaccatgtgatagattctcatacagctagataaccaaagaagatcagtcatacagctagataaccaaagaagacgcaggaataaaatatctttattttcattacatctgtgtgttggttttttgtgtgaggaacccctagtgatggagttggccactccctctctgcgcgctcgctcgctcactgaggccgggcgaccaaaggtcgcccgacgcccgggctttgcccgggcggcctcagtgagcgagcgagcgcgc

SEQ ID NO: 2419 - DNA, 4769 bp, synthetic construct
  source 1..4769: mol_type = other DNA
gcgcgctcgctcgctcactgaggccgcccgggcaaagcccgggcgtcgggcgacctttggtcgcccggcctcagtgagcgagcgagcgcgcagagagggagtggccaactccatcactaggggttcctcgtctgtctaattccagccaagggcatgggggaaaggacagagcccagggacctgtggcctattctctgagaggacgctgggctaataataggaggggagattagggagggatttgactgcattgttatctcacaggaatggcgtttgagagccttgcttccaagctcttccaagagtcatgccacccccctccaatctctgtggaagtgcccactgcctttcccgcttcgttctcttctctctaaatctgagcccaccccactcaggggtacaggatctggttcatttatctcccagaatgatgccttgggttgcgtcccctctaaactctggcacattccagcccctctttgggagaaagaacatctcttcttgcccaggccctagtgagacatgcatcgcaagacatgctccccccttcctccccgctgggctccagctgctgccagccctccaagaaaggagaggccctgagttgggctattttggtatctggggtgggcacccgcagggctaaggttaccttggtatgttaagggctccctggggcaggactatataaccccagagggactgccccatgctgactccttgcttctttcctgctcgagccgctgccttgccccccggagactgaagacacagcccaggtacctgggcaggtaagtatcaaggttacaagacaggtttaaggagaccaatagaaactgggcttgtcgagacagagaagactcttgcgtttctgataggcacctattggtcttactgacatccactttgcctttctctccacaggtgtccagactagtgccaccatgctgtggtgggaggaagtggaggactgctacgagagagaggacgtgcagaagaagaccttcaccaagtgggtgaacgcccagttcagcaagttcggcaagcagcacatcgagaacctgttcagcgacctgcaggacggcagaagactgctggacctgctggagggcctgaccggccagaagctgcctaaggagaagggcagcaccagagtgcacgctctcaacaacgtgaacaaggccctgagagtgctgcagaacaacaacgtggaccttgtgaacatcggaagcaccgacatcgtggatggcaaccacaagctgaccctgggactgatctggaacatcatcctgcactggcaggtgaagaacgtcatgaagaacatcatggccggcctgcagcagaccaacagcgaaaagatcctgctgagctgggtcagacagagcaccagaaactaccctcaggtgaacgtgatcaacttcaccaccagctggagcgacggcctggccctgaacgccctgatccacagccacagacccgacctgttcgactggaacagcgtggtgtgccagcagagcgccacccagagactggagcacgccttcaacatcgccagataccagctgggcatcgagaagctgctggaccccgaggacgtggataccacctaccccgacaagaagagcatcctgatgtacatcaccagcctgttccaggtgctgccccagcaagtgagcatcgaggccatccaggaggtggagatgctgcccagacctccaaaggtgaccaaggaggagcacttccagctgcaccaccagatgcactacagccagcagatcaccgtgagcctggcccagggctacgagagaaccagcagccccaagcccagattcaagagctacgcctacacccaggccgcctacgtgaccaccagcgaccccaccagaagccccttccccagccagcacctggaggcccccgaggataagagcttcggcagcagcctgatggagagcgaggtgaacttggacagataccagaccgccctggaggaggtgctgagctggctgctgagcgccgaggacacccttcaggcacagggcgagatcagcaacgacgtggaggtggtgaaggaccagttccacacccacgagggctacatgatggacctgaccgcccaccagggcagagtgggtaacatcctccagctgggaagcaagctgatcggcaccggcaagctgagcgaggacgaggagaccgaggtgcaagagcaaatgaacctgcttaacagcagatgggagtgcctgagagtggccagcatggagaagcagagcaacctgcacagagtgctgatggacctgcagaaccagaagctgaaggagctgaacgactggctgaccaagaccgaggagagaaccagaaagatggaggaggagcccctgggcccggacctggaggacctgaagcggcaggtgcagcagcacaaggtcttacaggaggacctggagcaggagcaagtgagagtgaacagcctgacccacatggtggtggtggtggatgagagcagcggcgaccacgccaccgccgccctggaggagcagctgaaggtgctgggcgacagatgggccaacatctgcagatggaccgaggacagatgggttctgctgcaggacatcctgctgaagtggcagagactgaccgaggaacagtgcctgttcagcgcctggctgagtgagaaggaagacgctgtgaacaagatccacaccaccggcttcaaggaccagaacgagatgctgagcagcctgcagaagctggccgtgctgaaggcagacctggagaagaaaaagcagtccatgggaaagctgtacagcctgaagcaagacctgctgagcaccctgaagaacaagagcgtgacccagaagaccgaggcctggctggacaacttcgccagatgctgggacaacctggttcagaagctggagaagagcaccgcccagatcagccaggccgtgaccaccacccagcccagcctgacccagaccaccgtgatggagaccgtgaccaccgtgaccaccagagagcagatcctggtgaagcacgcccaggaggagctgccccctcctcccccgcaaaagaagagaaccctggagagactgcaggagctgcaggaggctaccgatgagctggacctgaagctgagacaggccgaggtgatcaagggcagctggcagcccgtgggtgacctgcttatcgacagcctgcaggaccacctagagaaggtgaaggccctgagaggcgagatcgcccctctgaaggagaacgtgagccacgtgaacgacctggccagacagctgaccaccctgggaatccagctgagcccctacaacctgagcaccctggaggacctgaacacgagatggaagctgctgcaagtggccgtggaggacagagtcagacagttgcacgaggctcacagagatttcggccccgctagtcagcacttcctgagcaccagcgtgcagggcccctgggagagagctatcagcccaaacaaggtgccctactacatcaaccacgagacccagaccacctgctgggaccaccccaagatgaccgagctgtaccagagcctggcagacctcaacaacgtgagattcagcgcctacagaaccgccatgaagctgagaagactgcagaaggccctgtgcctggacctgctgagcctgagcgccgcctgcgacgccctggaccagcacaacctgaagcagaacgaccagcccatggacatccttcagatcatcaactgcctgaccaccatctacgacagactggagcaggaacataacaacctggtgaacgtgcccctgtgcgtggacatgtgcctgaactggctgctgaacgtgtacgacaccggcagaacaggcagaatcagagtgctgagcttcaagaccggcatcatcagcctgtgcaaggcccacctggaggacaagtacagatacttattcaagcaggtggccagcagcaccggcttctgcgatcagagaagactgggcctgctgctgcacgacagcatccagatccccagacagctgggcgaagtggccagcttcggcggcagcaacatcgagcccagcgtgagaagctgcttccagttcgctaacaacaagcccgagatcgaggccgccctgttcttggactggatgagactggagccccagagcatggtgtggctgcccgtgctgcacagagtggccgccgccgagaccgccaagcaccaggccaagtgtaacatctgcaaggagtgcccaatcatcggcttcagatacagaagcctgaagcacttcaactacgacatctgccagagctgcttcttcagcggcagagtggccaagggccacaagatgcactaccccatggtggagtactgcacccccaccaccagcggcgaggacgtgagagacttcgcaaaggtcctgaagaacaagttcagaaccaagagatacttcgctaagcaccccagaatgggctacctgcccgtgcagaccgtgctggagggcgataacatggagaccgacaccatgtgatagattctcatacagctagataaccaaagaagatcagtcatacagctagataaccaaagaagacgcaggaataaaatatctttattttcattacatctgtgtgttggttttttgtgtgaggaacccctagtgatggagttggccactccctctctgcgcgctcgctcgctcactgaggccgggcgaccaaaggtcgcccgacgcccgggctttgcccgggcggcctcagtgagcgagcgagcgcgc

SEQ ID NO: 2420 - DNA, 4769 bp, synthetic construct
  source 1..4769: mol_type = other DNA
gcgcgctcgctcgctcactgaggccgcccgggcaaagcccgggcgtcgggcgacctttggtcgcccggcctcagtgagcgagcgagcgcgcagagagggagtggccaactccatcactaggggttcctcgtctgtctaattccagccaagggcatgggggaaaggacagagcccagggacctgtggcctattctctgagaggacgctgggctaataataggaggggagattagggagggatttgactgcattgttatctcacaggaatggcgtttgagagccttgcttccaagctcttccaagagtcatgccacccccctccaatctctgtggaagtgcccactgcctttcccgcttcgttctcttctctcggtcccatccctgacccactagcctggtgccggggggagaccaatttctggaggaagctctgggtacccagtcttgccctaagcctgcctctgaacaggctgttcttgtttatgacccccgtcccagcagaatagtgattgctcatccctgcatgtgatttgagagggccagtctttcaggcctggaggaaactcaagccccaccagccgcttggcatcggaatgctcagctggtcccctcctggggctcatgtgaccaagatctagctataaatatcagaggggcctcagaccaagacagaattcgggcaccaggagaaggaagccaacaggatccgacccggtgttttgtgacaaaggcaagacccccaggtctacttagagcaacgttagtagaggacagcccaggtacctgggcaggtaagtatcaaggttacaagacaggtttaaggagaccaatagaaactgggcttgtcgagacagagaagactcttgcgtttctgataggcacctattggtcttactgacatccactttgcctttctctccacaggtgtccagactagtgccaccatgctgtggtgggaggaagtggaggactgctacgagagagaggacgtgcagaagaagaccttcaccaagtgggtgaacgcccagttcagcaagttcggcaagcagcacatcgagaacctgttcagcgacctgcaggacggcagaagactgctggacctgctggagggcctgaccggccagaagctgcctaaggagaagggcagcaccagagtgcacgctctcaacaacgtgaacaaggccctgagagtgctgcagaacaacaacgtggaccttgtgaacatcggaagcaccgacatcgtggatggcaaccacaagctgaccctgggactgatctggaacatcatcctgcactggcaggtgaagaacgtcatgaagaacatcatggccggcctgcagcagaccaacagcgaaaagatcctgctgagctgggtcagacagagcaccagaaactaccctcaggtgaacgtgatcaacttcaccaccagctggagcgacggcctggccctgaacgccctgatccacagccacagacccgacctgttcgactggaacagcgtggtgtgccagcagagcgccacccagagactggagcacgccttcaacatcgccagataccagctgggcatcgagaagctgctggaccccgaggacgtggataccacctaccccgacaagaagagcatcctgatgtacatcaccagcctgttccaggtgctgccccagcaagtgagcatcgaggccatccaggaggtggagatgctgcccagacctccaaaggtgaccaaggaggagcacttccagctgcaccaccagatgcactacagccagcagatcaccgtgagcctggcccagggctacgagagaaccagcagccccaagcccagattcaagagctacgcctacacccaggccgcctacgtgaccaccagcgaccccaccagaagccccttccccagccagcacctggaggcccccgaggataagagcttcggcagcagcctgatggagagcgaggtgaacttggacagataccagaccgccctggaggaggtgctgagctggctgctgagcgccgaggacacccttcaggcacagggcgagatcagcaacgacgtggaggtggtgaaggaccagttccacacccacgagggctacatgatggacctgaccgcccaccagggcagagtgggtaacatcctccagctgggaagcaagctgatcggcaccggcaagctgagcgaggacgaggagaccgaggtgcaagagcaaatgaacctgcttaacagcagatgggagtgcctgagagtggccagcatggagaagcagagcaacctgcacagagtgctgatggacctgcagaaccagaagctgaaggagctgaacgactggctgaccaagaccgaggagagaaccagaaagatggaggaggagcccctgggcccggacctggaggacctgaagcggcaggtgcagcagcacaaggtcttacaggaggacctggagcaggagcaagtgagagtgaacagcctgacccacatggtggtggtggtggatgagagcagcggcgaccacgccaccgccgccctggaggagcagctgaaggtgctgggcgacagatgggccaacatctgcagatggaccgaggacagatgggttctgctgcaggacatcctgctgaagtggcagagactgaccgaggaacagtgcctgttcagcgcctggctgagtgagaaggaagacgctgtgaacaagatccacaccaccggcttcaaggaccagaacgagatgctgagcagcctgcagaagctggccgtgctgaaggcagacctggagaagaaaaagcagtccatgggaaagctgtacagcctgaagcaagacctgctgagcaccctgaagaacaagagcgtgacccagaagaccgaggcctggctggacaacttcgccagatgctgggacaacctggttcagaagctggagaagagcaccgcccagatcagccaggccgtgaccaccacccagcccagcctgacccagaccaccgtgatggagaccgtgaccaccgtgaccaccagagagcagatcctggtgaagcacgcccaggaggagctgccccctcctcccccgcaaaagaagagaaccctggagagactgcaggagctgcaggaggctaccgatgagctggacctgaagctgagacaggccgaggtgatcaagggcagctggcagcccgtgggtgacctgcttatcgacagcctgcaggaccacctagagaaggtgaaggccctgagaggcgagatcgcccctctgaaggagaacgtgagccacgtgaacgacctggccagacagctgaccaccctgggaatccagctgagcccctacaacctgagcaccctggaggacctgaacacgagatggaagctgctgcaagtggccgtggaggacagagtcagacagttgcacgaggctcacagagatttcggccccgctagtcagcacttcctgagcaccagcgtgcagggcccctgggagagagctatcagcccaaacaaggtgccctactacatcaaccacgagacccagaccacctgctgggaccaccccaagatgaccgagctgtaccagagcctggcagacctcaacaacgtgagattcagcgcctacagaaccgccatgaagctgagaagactgcagaaggccctgtgcctggacctgctgagcctgagcgccgcctgcgacgccctggaccagcacaacctgaagcagaacgaccagcccatggacatccttcagatcatcaactgcctgaccaccatctacgacagactggagcaggaacataacaacctggtgaacgtgcccctgtgcgtggacatgtgcctgaactggctgctgaacgtgtacgacaccggcagaacaggcagaatcagagtgctgagcttcaagaccggcatcatcagcctgtgcaaggcccacctggaggacaagtacagatacttattcaagcaggtggccagcagcaccggcttctgcgatcagagaagactgggcctgctgctgcacgacagcatccagatccccagacagctgggcgaagtggccagcttcggcggcagcaacatcgagcccagcgtgagaagctgcttccagttcgctaacaacaagcccgagatcgaggccgccctgttcttggactggatgagactggagccccagagcatggtgtggctgcccgtgctgcacagagtggccgccgccgagaccgccaagcaccaggccaagtgtaacatctgcaaggagtgcccaatcatcggcttcagatacagaagcctgaagcacttcaactacgacatctgccagagctgcttcttcagcggcagagtggccaagggccacaagatgcactaccccatggtggagtactgcacccccaccaccagcggcgaggacgtgagagacttcgcaaaggtcctgaagaacaagttcagaaccaagagatacttcgctaagcaccccagaatgggctacctgcccgtgcagaccgtgctggagggcgataacatggagaccgacaccatgtgatagattctcatacagctagataaccaaagaagatcagtcatacagctagataaccaaagaagacgcaggaataaaatatctttattttcattacatctgtgtgttggttttttgtgtgaggaacccctagtgatggagttggccactccctctctgcgcgctcgctcgctcactgaggccgggcgaccaaaggtcgcccgacgcccgggctttgcccgggcggcctcagtgagcgagcgagcgcgc

SEQ ID NO: 2421 - DNA, 4807 bp, synthetic construct
  source 1..4807: mol_type = other DNA
gcgcgctcgctcgctcactgaggccgcccgggcaaagcccgggcgtcgggcgacctttggtcgcccggcctcagtgagcgagcgagcgcgcagagagggagtggccaactccatcactaggggttccttagttattaatagtaatcaattacggggtcattagttcatagcccatatatggagttccgcgttacataacttacggtaaatggcccgcctggctgaccgcccaacgacccccgcccattgacgtcaataatgacgtatgttcccatagtaacgccaatagggactttccattgacgtcaatgggtggagtatttacggtaaactgcccacttggcagtacatcaagtgtatcatatgccaagtacgccccctattgacgtcaatgacggtaaatggcccgcctggcattatgcccagtacatgaccttatgggactttcctacttggcagtacatctacgtattagtcatcgctattaccatgctagactagcatgctgcccatgtaaggaggcaaggcctggggacacccgagatgcctggttataattaacccagacatgtggctgccccccccccccaacacctgctgcctctaaaaataaccctgcatgccatgttcccggcgaagggccagctgtcccccgccagctagactcagctctcaggggcccctccctggggacagcccctcctggctagtcacaccctgtaggctcctctatataacccaggggcacaggggctgccctcattctaccaccacctccacagcacagacagacactcaggagccagccagccagcccaggtacctgggcaggtaagtatcaaggttacaagacaggtttaaggagaccaatagaaactgggcttgtcgagacagagaagactcttgcgtttctgataggcacctattggtcttactgacatccactttgcctttctctccacaggtgtccagactagtgccaccatgctgtggtgggaagaggtcgaggactgctacgagcgcgaagatgtgcagaagaaaactttcactaaatgggtgaatgcccagttctctaagttcggaaagcagcacatcgaaaacctgttttccgatctgcaagatggccggcggctgctggacctgctggaggggctgaccggacagaagctgcctaaggagaaaggatctaccagggtccatgctctgaataacgtgaacaaggctctgagggtgctgcagaacaataacgtggacctggtgaacattggttccacagacatcgtggatggaaaccacaaactgacactgggactgatctggaacatcattctgcattggcaagtgaagaacgtgatgaagaacatcatggccggactgcagcagacgaactccgagaagatcctgcttagctgggtgagacagagtacccggaattacccacaggtgaacgtgatcaatttcacaaccagctggtcagacggcctggctctgaatgccctgattcatagccaccggccagatctgtttgactggaactctgtcgtgtgtcagcagtcagccacccagaggctggagcacgccttcaatattgcccgctatcagctggggattgagaaactgctggaccccgaggatgtggacacaacataccctgacaagaagagcatacttatgtatatcacaagcctgttccaggtgctgccacagcaggtctccatcgaggccattcaagaagtggagatgctgcccaggcctcctaaggtcaccaaagaggagcactttcagctccatcatcagatgcactacagccagcaaattaccgtgtccctggcccagggctacgagaggacaagttcccccaagcctagatttaagagctatgcctatacccaggccgcctacgtgactacctccgatcccaccaggagcccatttcccagccagcacctggaggctcccgaagataagagctttggcagcagcctgatggaatctgaggtgaacctggacagataccagactgcgctggaggaggtgctgtcctggctgctgagcgccgaggacaccctgcaggctcagggcgagattagtaatgatgtggaggtggtgaaggatcagtttcacactcacgaaggctacatgatggacctgaccgcccaccagggcagggtggggaacattctgcagctcgggagtaagctgatagggaccggcaaactgtccgaggatgaggaaaccgaggtgcaggagcagatgaacctgcttaactcccggtgggagtgtctgagagtggccagcatggagaagcagagcaatctgcacagagtgctgatggatctgcagaatcagaagctgaaggaactgaatgattggctcacaaagacagaggagaggactagaaagatggaggaggagcccctgggccctgacctggaggacctgaagcgacaggtgcagcagcacaaggtgctgcaggaggatctggagcaagaacaagtgagggtgaactctctgactcatatggttgtggtggtggacgagtcttccggagaccacgcaactgccgccctcgaggagcagctgaaggtgctgggcgataggtgggctaatatctgtaggtggaccgaggacagatgggtgctgctgcaggatatcctgctgaaatggcagcgcctgacagaagagcagtgtctgttcagcgcatggctgagcgaaaaggaggacgctgtgaacaagatccacactacaggatttaaagaccagaacgagatgctgagtagcctgcagaagctggctgtgctgaaggctgatttggagaaaaagaagcagagcatgggcaagctgtactccctgaaacaggacctgctgagcaccctgaagaataagtccgtgacccagaaaaccgaagcttggctggacaacttcgcgcgctgctgggataacctggtgcagaagctggagaagagcaccgcccagatttctcaagcagtgaccacaacccagcccagcctgacccagactacagtaatggagacagtcactaccgtgaccacccgggagcagatcctggtgaagcacgcccaggaagagctgccgcccccaccaccccagaaaaagcggaccctggagcgcctgcaggagctccaggaggccaccgacgaactggatctgaagctgaggcaggccgaggtgattaagggatcctggcagcctgtgggagacctgctgatcgacagcctgcaggatcatctggagaaagtcaaagctctgagaggggagatcgccccactgaaggagaacgtgagccacgtgaatgacctggctagacagctgaccaccttgggcattcagctgagtccttacaatctgtcaactctggaggatctgaacacccggtggaaactgctgcaggtggctgtggaagatcgggtgcgccagttacatgaggcccacagggactttggcccagcctcacagcactttctgtcaacctctgtgcaaggaccttgggagagagcaatcagcccaaacaaggtgccatattatatcaatcatgagactcagacaacttgctgggatcaccccaagatgacagaactctatcagtcactcgccgatctcaataatgtacggttctctgcctaccggacagctatgaagctgcggaggctgcagaaggcactctgtctggacctgctgagtctctctgcggcctgcgatgccctggatcaacataacctgaagcagaatgatcagcctatggacatcctgcagatcattaactgtctcaccacaatctacgatcggctggaacaggaacataacaacctggtgaatgtgccactgtgtgtggacatgtgcctgaattggctgctcaacgtctacgatacaggcaggactggcaggatccgcgtgctgagctttaaaaccggcatcatctctctgtgcaaagcccacctggaggacaaatatcggtacctgtttaagcaggtggcctccagcacaggcttctgtgatcagcgccggctgggcctgctgctgcacgacagcattcagatccctaggcagctgggcgaggtggcctccttcggcggctcaaacattgaacccagcgtgagatcttgctttcagtttgcaaataataaacccgagatcgaggccgccctgttcctggattggatgagactggagcctcagagtatggtgtggctgccagtgctgcatagagtggccgccgctgagacggccaagcaccaggcaaagtgcaatatctgcaaggaatgccccattattggctttcgataccggtccttgaaacacttcaattatgacatctgccagtcatgcttcttcagcggacgcgtggccaagggacacaagatgcattatcctatggtggaatactgcactccaactacttccggcgaggacgtgagagatttcgctaaagttcttaaaaacaaatttcggactaagaggtacttcgccaagcacccccgcatgggctatctgcctgtgcagacagtgcttgaaggagacaacatggaaaccgatacaatgtgatagattccaacaaaatcactgatgctggaagatcagcaacaaaatcactgatgctggaagacgcaggaataaaatatctttattttcattacatctgtgtgttggttttttgtgtgaggaacccctagtgatggagttggccactccctctctgcgcgctcgctcgctcactgaggccgggcgaccaaaggtcgcccgacgcccgggctttgcccgggcggcctcagtgagcgagcgagcgcgc

SEQ ID NO: 2422 - DNA, 4767 bp, synthetic construct
  source 1..4767: mol_type = other DNA
gcgcgctcgctcgctcactgaggccgcccgggcaaagcccgggcgtcgggcgacctttggtcgcccggcctcagtgagcgagcgagcgcgcagagagggagtggccaactccatcactaggggttcctcgtctgtctaattccagccaagggcatgggggaaaggacagagcccagggacctgtggcctattctctgagaggacgctgggctaataataggaggggagattagggagggatttgactgcattgttatctcacaggaatggcgtttgagagccttgcttccaagctcttccaagagtcatgccacccccctccaatctctgtggaagtgcccactgcctttcccgcttcgttctcttctctctaaatctgagcccaccccactcaggggtacaggatctggttcatttatctcccagaatgatgccttgggttgcgtcccctctaaactctggcacattccagcccctctttgggagaaagaacatctcttcttgcccaggccctagtgagacatgcatcgcaagacatgctccccccttcctccccgctgggctccagctgctgccagccctccaagaaaggagaggccctgagttgggctattttggtatctggggtgggcacccgcagggctaaggttaccttggtatgttaagggctccctggggcaggactatataaccccagagggactgccccatgctgactccttgcttctttcctgctcgagccgctgccttgccccccggagactgaagacacagcccaggtacctgggcaggtaagtatcaaggttacaagacaggtttaaggagaccaatagaaactgggcttgtcgagacagagaagactcttgcgtttctgataggcacctattggtcttactgacatccactttgcctttctctccacaggtgtccagactagtgccaccatgctgtggtgggaagaggtcgaggactgctacgagcgcgaagatgtgcagaagaaaactttcactaaatgggtgaatgcccagttctctaagttcggaaagcagcacatcgaaaacctgttttccgatctgcaagatggccggcggctgctggacctgctggaggggctgaccggacagaagctgcctaaggagaaaggatctaccagggtccatgctctgaataacgtgaacaaggctctgagggtgctgcagaacaataacgtggacctggtgaacattggttccacagacatcgtggatggaaaccacaaactgacactgggactgatctggaacatcattctgcattggcaagtgaagaacgtgatgaagaacatcatggccggactgcagcagacgaactccgagaagatcctgcttagctgggtgagacagagtacccggaattacccacaggtgaacgtgatcaatttcacaaccagctggtcagacggcctggctctgaatgccctgattcatagccaccggccagatctgtttgactggaactctgtcgtgtgtcagcagtcagccacccagaggctggagcacgccttcaatattgcccgctatcagctggggattgagaaactgctggaccccgaggatgtggacacaacataccctgacaagaagagcatacttatgtatatcacaagcctgttccaggtgctgccacagcaggtctccatcgaggccattcaagaagtggagatgctgcccaggcctcctaaggtcaccaaagaggagcactttcagctccatcatcagatgcactacagccagcaaattaccgtgtccctggcccagggctacgagaggacaagttcccccaagcctagatttaagagctatgcctatacccaggccgcctacgtgactacctccgatcccaccaggagcccatttcccagccagcacctggaggctcccgaagataagagctttggcagcagcctgatggaatctgaggtgaacctggacagataccagactgcgctggaggaggtgctgtcctggctgctgagcgccgaggacaccctgcaggctcagggcgagattagtaatgatgtggaggtggtgaaggatcagtttcacactcacgaaggctacatgatggacctgaccgcccaccagggcagggtggggaacattctgcagctcgggagtaagctgatagggaccggcaaactgtccgaggatgaggaaaccgaggtgcaggagcagatgaacctgcttaactcccggtgggagtgtctgagagtggccagcatggagaagcagagcaatctgcacagagtgctgatggatctgcagaatcagaagctgaaggaactgaatgattggctcacaaagacagaggagaggactagaaagatggaggaggagcccctgggccctgacctggaggacctgaagcgacaggtgcagcagcacaaggtgctgcaggaggatctggagcaagaacaagtgagggtgaactctctgactcatatggttgtggtggtggacgagtcttccggagaccacgcaactgccgccctcgaggagcagctgaaggtgctgggcgataggtgggctaatatctgtaggtggaccgaggacagatgggtgctgctgcaggatatcctgctgaaatggcagcgcctgacagaagagcagtgtctgttcagcgcatggctgagcgaaaaggaggacgctgtgaacaagatccacactacaggatttaaagaccagaacgagatgctgagtagcctgcagaagctggctgtgctgaaggctgatttggagaaaaagaagcagagcatgggcaagctgtactccctgaaacaggacctgctgagcaccctgaagaataagtccgtgacccagaaaaccgaagcttggctggacaacttcgcgcgctgctgggataacctggtgcagaagctggagaagagcaccgcccagatttctcaagcagtgaccacaacccagcccagcctgacccagactacagtaatggagacagtcactaccgtgaccacccgggagcagatcctggtgaagcacgcccaggaagagctgccgcccccaccaccccagaaaaagcggaccctggagcgcctgcaggagctccaggaggccaccgacgaactggatctgaagctgaggcaggccgaggtgattaagggatcctggcagcctgtgggagacctgctgatcgacagcctgcaggatcatctggagaaagtcaaagctctgagaggggagatcgccccactgaaggagaacgtgagccacgtgaatgacctggctagacagctgaccaccttgggcattcagctgagtccttacaatctgtcaactctggaggatctgaacacccggtggaaactgctgcaggtggctgtggaagatcgggtgcgccagttacatgaggcccacagggactttggcccagcctcacagcactttctgtcaacctctgtgcaaggaccttgggagagagcaatcagcccaaacaaggtgccatattatatcaatcatgagactcagacaacttgctgggatcaccccaagatgacagaactctatcagtcactcgccgatctcaataatgtacggttctctgcctaccggacagctatgaagctgcggaggctgcagaaggcactctgtctggacctgctgagtctctctgcggcctgcgatgccctggatcaacataacctgaagcagaatgatcagcctatggacatcctgcagatcattaactgtctcaccacaatctacgatcggctggaacaggaacataacaacctggtgaatgtgccactgtgtgtggacatgtgcctgaattggctgctcaacgtctacgatacaggcaggactggcaggatccgcgtgctgagctttaaaaccggcatcatctctctgtgcaaagcccacctggaggacaaatatcggtacctgtttaagcaggtggcctccagcacaggcttctgtgatcagcgccggctgggcctgctgctgcacgacagcattcagatccctaggcagctgggcgaggtggcctccttcggcggctcaaacattgaacccagcgtgagatcttgctttcagtttgcaaataataaacccgagatcgaggccgccctgttcctggattggatgagactggagcctcagagtatggtgtggctgccagtgctgcatagagtggccgccgctgagacggccaagcaccaggcaaagtgcaatatctgcaaggaatgccccattattggctttcgataccggtccttgaaacacttcaattatgacatctgccagtcatgcttcttcagcggacgcgtggccaagggacacaagatgcattatcctatggtggaatactgcactccaactacttccggcgaggacgtgagagatttcgctaaagttcttaaaaacaaatttcggactaagaggtacttcgccaagcacccccgcatgggctatctgcctgtgcagacagtgcttgaaggagacaacatggaaaccgatacaatgtgatagattccaacaaaatcactgatgctggaagatcagcaacaaaatcactgatgctggaagacgcaggaataaaatatctttattttcattacatctgtgtgttggttttttgtgtgaggaacccctagtgatggagttggccactccctctctgcgcgctcgctcgctcactgaggccgggcgaccaaaggtcgcccgacgcccgggctttgcccgggcggcctcagtgagcgagcgagcgcgc

SEQ ID NO: 2423 - DNA, 4767 bp, synthetic construct
  source 1..4767: mol_type = other DNA
gcgcgctcgctcgctcactgaggccgcccgggcaaagcccgggcgtcgggcgacctttggtcgcccggcctcagtgagcgagcgagcgcgcagagagggagtggccaactccatcactaggggttcctcgtctgtctaattccagccaagggcatgggggaaaggacagagcccagggacctgtggcctattctctgagaggacgctgggctaataataggaggggagattagggagggatttgactgcattgttatctcacaggaatggcgtttgagagccttgcttccaagctcttccaagagtcatgccacccccctccaatctctgtggaagtgcccactgcctttcccgcttcgttctcttctctcggtcccatccctgacccactagcctggtgccggggggagaccaatttctggaggaagctctgggtacccagtcttgccctaagcctgcctctgaacaggctgttcttgtttatgacccccgtcccagcagaatagtgattgctcatccctgcatgtgatttgagagggccagtctttcaggcctggaggaaactcaagccccaccagccgcttggcatcggaatgctcagctggtcccctcctggggctcatgtgaccaagatctagctataaatatcagaggggcctcagaccaagacagaattcgggcaccaggagaaggaagccaacaggatccgacccggtgttttgtgacaaaggcaagacccccaggtctacttagagcaacgttagtagaggacagcccaggtacctgggcaggtaagtatcaaggttacaagacaggtttaaggagaccaatagaaactgggcttgtcgagacagagaagactcttgcgtttctgataggcacctattggtcttactgacatccactttgcctttctctccacaggtgtccagactagtgccaccatgctgtggtgggaagaggtcgaggactgctacgagcgcgaagatgtgcagaagaaaactttcactaaatgggtgaatgcccagttctctaagttcggaaagcagcacatcgaaaacctgttttccgatctgcaagatggccggcggctgctggacctgctggaggggctgaccggacagaagctgcctaaggagaaaggatctaccagggtccatgctctgaataacgtgaacaaggctctgagggtgctgcagaacaataacgtggacctggtgaacattggttccacagacatcgtggatggaaaccacaaactgacactgggactgatctggaacatcattctgcattggcaagtgaagaacgtgatgaagaacatcatggccggactgcagcagacgaactccgagaagatcctgcttagctgggtgagacagagtacccggaattacccacaggtgaacgtgatcaatttcacaaccagctggtcagacggcctggctctgaatgccctgattcatagccaccggccagatctgtttgactggaactctgtcgtgtgtcagcagtcagccacccagaggctggagcacgccttcaatattgcccgctatcagctggggattgagaaactgctggaccccgaggatgtggacacaacataccctgacaagaagagcatacttatgtatatcacaagcctgttccaggtgctgccacagcaggtctccatcgaggccattcaagaagtggagatgctgcccaggcctcctaaggtcaccaaagaggagcactttcagctccatcatcagatgcactacagccagcaaattaccgtgtccctggcccagggctacgagaggacaagttcccccaagcctagatttaagagctatgcctatacccaggccgcctacgtgactacctccgatcccaccaggagcccatttcccagccagcacctggaggctcccgaagataagagctttggcagcagcctgatggaatctgaggtgaacctggacagataccagactgcgctggaggaggtgctgtcctggctgctgagcgccgaggacaccctgcaggctcagggcgagattagtaatgatgtggaggtggtgaaggatcagtttcacactcacgaaggctacatgatggacctgaccgcccaccagggcagggtggggaacattctgcagctcgggagtaagctgatagggaccggcaaactgtccgaggatgaggaaaccgaggtgcaggagcagatgaacctgcttaactcccggtgggagtgtctgagagtggccagcatggagaagcagagcaatctgcacagagtgctgatggatctgcagaatcagaagctgaaggaactgaatgattggctcacaaagacagaggagaggactagaaagatggaggaggagcccctgggccctgacctggaggacctgaagcgacaggtgcagcagcacaaggtgctgcaggaggatctggagcaagaacaagtgagggtgaactctctgactcatatggttgtggtggtggacgagtcttccggagaccacgcaactgccgccctcgaggagcagctgaaggtgctgggcgataggtgggctaatatctgtaggtggaccgaggacagatgggtgctgctgcaggatatcctgctgaaatggcagcgcctgacagaagagcagtgtctgttcagcgcatggctgagcgaaaaggaggacgctgtgaacaagatccacactacaggatttaaagaccagaacgagatgctgagtagcctgcagaagctggctgtgctgaaggctgatttggagaaaaagaagcagagcatgggcaagctgtactccctgaaacaggacctgctgagcaccctgaagaataagtccgtgacccagaaaaccgaagcttggctggacaacttcgcgcgctgctgggataacctggtgcagaagctggagaagagcaccgcccagatttctcaagcagtgaccacaacccagcccagcctgacccagactacagtaatggagacagtcactaccgtgaccacccgggagcagatcctggtgaagcacgcccaggaagagctgccgcccccaccaccccagaaaaagcggaccctggagcgcctgcaggagctccaggaggccaccgacgaactggatctgaagctgaggcaggccgaggtgattaagggatcctggcagcctgtgggagacctgctgatcgacagcctgcaggatcatctggagaaagtcaaagctctgagaggggagatcgccccactgaaggagaacgtgagccacgtgaatgacctggctagacagctgaccaccttgggcattcagctgagtccttacaatctgtcaactctggaggatctgaacacccggtggaaactgctgcaggtggctgtggaagatcgggtgcgccagttacatgaggcccacagggactttggcccagcctcacagcactttctgtcaacctctgtgcaaggaccttgggagagagcaatcagcccaaacaaggtgccatattatatcaatcatgagactcagacaacttgctgggatcaccccaagatgacagaactctatcagtcactcgccgatctcaataatgtacggttctctgcctaccggacagctatgaagctgcggaggctgcagaaggcactctgtctggacctgctgagtctctctgcggcctgcgatgccctggatcaacataacctgaagcagaatgatcagcctatggacatcctgcagatcattaactgtctcaccacaatctacgatcggctggaacaggaacataacaacctggtgaatgtgccactgtgtgtggacatgtgcctgaattggctgctcaacgtctacgatacaggcaggactggcaggatccgcgtgctgagctttaaaaccggcatcatctctctgtgcaaagcccacctggaggacaaatatcggtacctgtttaagcaggtggcctccagcacaggcttctgtgatcagcgccggctgggcctgctgctgcacgacagcattcagatccctaggcagctgggcgaggtggcctccttcggcggctcaaacattgaacccagcgtgagatcttgctttcagtttgcaaataataaacccgagatcgaggccgccctgttcctggattggatgagactggagcctcagagtatggtgtggctgccagtgctgcatagagtggccgccgctgagacggccaagcaccaggcaaagtgcaatatctgcaaggaatgccccattattggctttcgataccggtccttgaaacacttcaattatgacatctgccagtcatgcttcttcagcggacgcgtggccaagggacacaagatgcattatcctatggtggaatactgcactccaactacttccggcgaggacgtgagagatttcgctaaagttcttaaaaacaaatttcggactaagaggtacttcgccaagcacccccgcatgggctatctgcctgtgcagacagtgcttgaaggagacaacatggaaaccgatacaatgtgatagattccaacaaaatcactgatgctggaagatcagcaacaaaatcactgatgctggaagacgcaggaataaaatatctttattttcattacatctgtgtgttggttttttgtgtgaggaacccctagtgatggagttggccactccctctctgcgcgctcgctcgctcactgaggccgggcgaccaaaggtcgcccgacgcccgggctttgcccgggcggcctcagtgagcgagcgagcgcgc

SEQ ID NO: 2424 - DNA, 4809 bp, synthetic construct
  source 1..4809: mol_type = other DNA
gcgcgctcgctcgctcactgaggccgcccgggcaaagcccgggcgtcgggcgacctttggtcgcccggcctcagtgagcgagcgagcgcgcagagagggagtggccaactccatcactaggggttccttagttattaatagtaatcaattacggggtcattagttcatagcccatatatggagttccgcgttacataacttacggtaaatggcccgcctggctgaccgcccaacgacccccgcccattgacgtcaataatgacgtatgttcccatagtaacgccaatagggactttccattgacgtcaatgggtggagtatttacggtaaactgcccacttggcagtacatcaagtgtatcatatgccaagtacgccccctattgacgtcaatgacggtaaatggcccgcctggcattatgcccagtacatgaccttatgggactttcctacttggcagtacatctacgtattagtcatcgctattaccatgctagactagcatgctgcccatgtaaggaggcaaggcctggggacacccgagatgcctggttataattaacccagacatgtggctgccccccccccccaacacctgctgcctctaaaaataaccctgcatgccatgttcccggcgaagggccagctgtcccccgccagctagactcagctctcaggggcccctccctggggacagcccctcctggctagtcacaccctgtaggctcctctatataacccaggggcacaggggctgccctcattctaccaccacctccacagcacagacagacactcaggagccagccagccagcccaggtacctgggcaggtaagtatcaaggttacaagacaggtttaaggagaccaatagaaactgggcttgtcgagacagagaagactcttgcgtttctgataggcacctattggtcttactgacatccactttgcctttctctccacaggtgtccagactagtgccaccatgctgtggtgggaagaggtcgaggactgctacgagcgcgaagatgtgcagaagaaaactttcactaaatgggtgaatgcccagttctctaagttcggaaagcagcacatcgaaaacctgttttccgatctgcaagatggccggcggctgctggacctgctggaggggctgaccggacagaagctgcctaaggagaaaggatctaccagggtccatgctctgaataacgtgaacaaggctctgagggtgctgcagaacaataacgtggacctggtgaacattggttccacagacatcgtggatggaaaccacaaactgacactgggactgatctggaacatcattctgcattggcaagtgaagaacgtgatgaagaacatcatggccggactgcagcagacgaactccgagaagatcctgcttagctgggtgagacagagtacccggaattacccacaggtgaacgtgatcaatttcacaaccagctggtcagacggcctggctctgaatgccctgattcatagccaccggccagatctgtttgactggaactctgtcgtgtgtcagcagtcagccacccagaggctggagcacgccttcaatattgcccgctatcagctggggattgagaaactgctggaccccgaggatgtggacacaacataccctgacaagaagagcatacttatgtatatcacaagcctgttccaggtgctgccacagcaggtctccatcgaggccattcaagaagtggagatgctgcccaggcctcctaaggtcaccaaagaggagcactttcagctccatcatcagatgcactacagccagcaaattaccgtgtccctggcccagggctacgagaggacaagttcccccaagcctagatttaagagctatgcctatacccaggccgcctacgtgactacctccgatcccaccaggagcccatttcccagccagcacctggaggctcccgaagataagagctttggcagcagcctgatggaatctgaggtgaacctggacagataccagactgcgctggaggaggtgctgtcctggctgctgagcgccgaggacaccctgcaggctcagggcgagattagtaatgatgtggaggtggtgaaggatcagtttcacactcacgaaggctacatgatggacctgaccgcccaccagggcagggtggggaacattctgcagctcgggagtaagctgatagggaccggcaaactgtccgaggatgaggaaaccgaggtgcaggagcagatgaacctgcttaactcccggtgggagtgtctgagagtggccagcatggagaagcagagcaatctgcacagagtgctgatggatctgcagaatcagaagctgaaggaactgaatgattggctcacaaagacagaggagaggactagaaagatggaggaggagcccctgggccctgacctggaggacctgaagcgacaggtgcagcagcacaaggtgctgcaggaggatctggagcaagaacaagtgagggtgaactctctgactcatatggttgtggtggtggacgagtcttccggagaccacgcaactgccgccctcgaggagcagctgaaggtgctgggcgataggtgggctaatatctgtaggtggaccgaggacagatgggtgctgctgcaggatatcctgctgaaatggcagcgcctgacagaagagcagtgtctgttcagcgcatggctgagcgaaaaggaggacgctgtgaacaagatccacactacaggatttaaagaccagaacgagatgctgagtagcctgcagaagctggctgtgctgaaggctgatttggagaaaaagaagcagagcatgggcaagctgtactccctgaaacaggacctgctgagcaccctgaagaataagtccgtgacccagaaaaccgaagcttggctggacaacttcgcgcgctgctgggataacctggtgcagaagctggagaagagcaccgcccagatttctcaagcagtgaccacaacccagcccagcctgacccagactacagtaatggagacagtcactaccgtgaccacccgggagcagatcctggtgaagcacgcccaggaagagctgccgcccccaccaccccagaaaaagcggaccctggagcgcctgcaggagctccaggaggccaccgacgaactggatctgaagctgaggcaggccgaggtgattaagggatcctggcagcctgtgggagacctgctgatcgacagcctgcaggatcatctggagaaagtcaaagctctgagaggggagatcgccccactgaaggagaacgtgagccacgtgaatgacctggctagacagctgaccaccttgggcattcagctgagtccttacaatctgtcaactctggaggatctgaacacccggtggaaactgctgcaggtggctgtggaagatcgggtgcgccagttacatgaggcccacagggactttggcccagcctcacagcactttctgtcaacctctgtgcaaggaccttgggagagagcaatcagcccaaacaaggtgccatattatatcaatcatgagactcagacaacttgctgggatcaccccaagatgacagaactctatcagtcactcgccgatctcaataatgtacggttctctgcctaccggacagctatgaagctgcggaggctgcagaaggcactctgtctggacctgctgagtctctctgcggcctgcgatgccctggatcaacataacctgaagcagaatgatcagcctatggacatcctgcagatcattaactgtctcaccacaatctacgatcggctggaacaggaacataacaacctggtgaatgtgccactgtgtgtggacatgtgcctgaattggctgctcaacgtctacgatacaggcaggactggcaggatccgcgtgctgagctttaaaaccggcatcatctctctgtgcaaagcccacctggaggacaaatatcggtacctgtttaagcaggtggcctccagcacaggcttctgtgatcagcgccggctgggcctgctgctgcacgacagcattcagatccctaggcagctgggcgaggtggcctccttcggcggctcaaacattgaacccagcgtgagatcttgctttcagtttgcaaataataaacccgagatcgaggccgccctgttcctggattggatgagactggagcctcagagtatggtgtggctgccagtgctgcatagagtggccgccgctgagacggccaagcaccaggcaaagtgcaatatctgcaaggaatgccccattattggctttcgataccggtccttgaaacacttcaattatgacatctgccagtcatgcttcttcagcggacgcgtggccaagggacacaagatgcattatcctatggtggaatactgcactccaactacttccggcgaggacgtgagagatttcgctaaagttcttaaaaacaaatttcggactaagaggtacttcgccaagcacccccgcatgggctatctgcctgtgcagacagtgcttgaaggagacaacatggaaaccgatacaatgtgatagattccggcctgattcacaacaccagctagatcagcggcctgattcacaacaccagctagacgcaggaataaaatatctttattttcattacatctgtgtgttggttttttgtgtgaggaacccctagtgatggagttggccactccctctctgcgcgctcgctcgctcactgaggccgggcgaccaaaggtcgcccgacgcccgggctttgcccgggcggcctcagtgagcgagcgagcgcgc

SEQ ID NO: 2425 - DNA, 4769 bp, synthetic construct
  source 1..4769: mol_type = other DNA
gcgcgctcgctcgctcactgaggccgcccgggcaaagcccgggcgtcgggcgacctttggtcgcccggcctcagtgagcgagcgagcgcgcagagagggagtggccaactccatcactaggggttcctcgtctgtctaattccagccaagggcatgggggaaaggacagagcccagggacctgtggcctattctctgagaggacgctgggctaataataggaggggagattagggagggatttgactgcattgttatctcacaggaatggcgtttgagagccttgcttccaagctcttccaagagtcatgccacccccctccaatctctgtggaagtgcccactgcctttcccgcttcgttctcttctctctaaatctgagcccaccccactcaggggtacaggatctggttcatttatctcccagaatgatgccttgggttgcgtcccctctaaactctggcacattccagcccctctttgggagaaagaacatctcttcttgcccaggccctagtgagacatgcatcgcaagacatgctccccccttcctccccgctgggctccagctgctgccagccctccaagaaaggagaggccctgagttgggctattttggtatctggggtgggcacccgcagggctaaggttaccttggtatgttaagggctccctggggcaggactatataaccccagagggactgccccatgctgactccttgcttctttcctgctcgagccgctgccttgccccccggagactgaagacacagcccaggtacctgggcaggtaagtatcaaggttacaagacaggtttaaggagaccaatagaaactgggcttgtcgagacagagaagactcttgcgtttctgataggcacctattggtcttactgacatccactttgcctttctctccacaggtgtccagactagtgccaccatgctgtggtgggaagaggtcgaggactgctacgagcgcgaagatgtgcagaagaaaactttcactaaatgggtgaatgcccagttctctaagttcggaaagcagcacatcgaaaacctgttttccgatctgcaagatggccggcggctgctggacctgctggaggggctgaccggacagaagctgcctaaggagaaaggatctaccagggtccatgctctgaataacgtgaacaaggctctgagggtgctgcagaacaataacgtggacctggtgaacattggttccacagacatcgtggatggaaaccacaaactgacactgggactgatctggaacatcattctgcattggcaagtgaagaacgtgatgaagaacatcatggccggactgcagcagacgaactccgagaagatcctgcttagctgggtgagacagagtacccggaattacccacaggtgaacgtgatcaatttcacaaccagctggtcagacggcctggctctgaatgccctgattcatagccaccggccagatctgtttgactggaactctgtcgtgtgtcagcagtcagccacccagaggctggagcacgccttcaatattgcccgctatcagctggggattgagaaactgctggaccccgaggatgtggacacaacataccctgacaagaagagcatacttatgtatatcacaagcctgttccaggtgctgccacagcaggtctccatcgaggccattcaagaagtggagatgctgcccaggcctcctaaggtcaccaaagaggagcactttcagctccatcatcagatgcactacagccagcaaattaccgtgtccctggcccagggctacgagaggacaagttcccccaagcctagatttaagagctatgcctatacccaggccgcctacgtgactacctccgatcccaccaggagcccatttcccagccagcacctggaggctcccgaagataagagctttggcagcagcctgatggaatctgaggtgaacctggacagataccagactgcgctggaggaggtgctgtcctggctgctgagcgccgaggacaccctgcaggctcagggcgagattagtaatgatgtggaggtggtgaaggatcagtttcacactcacgaaggctacatgatggacctgaccgcccaccagggcagggtggggaacattctgcagctcgggagtaagctgatagggaccggcaaactgtccgaggatgaggaaaccgaggtgcaggagcagatgaacctgcttaactcccggtgggagtgtctgagagtggccagcatggagaagcagagcaatctgcacagagtgctgatggatctgcagaatcagaagctgaaggaactgaatgattggctcacaaagacagaggagaggactagaaagatggaggaggagcccctgggccctgacctggaggacctgaagcgacaggtgcagcagcacaaggtgctgcaggaggatctggagcaagaacaagtgagggtgaactctctgactcatatggttgtggtggtggacgagtcttccggagaccacgcaactgccgccctcgaggagcagctgaaggtgctgggcgataggtgggctaatatctgtaggtggaccgaggacagatgggtgctgctgcaggatatcctgctgaaatggcagcgcctgacagaagagcagtgtctgttcagcgcatggctgagcgaaaaggaggacgctgtgaacaagatccacactacaggatttaaagaccagaacgagatgctgagtagcctgcagaagctggctgtgctgaaggctgatttggagaaaaagaagcagagcatgggcaagctgtactccctgaaacaggacctgctgagcaccctgaagaataagtccgtgacccagaaaaccgaagcttggctggacaacttcgcgcgctgctgggataacctggtgcagaagctggagaagagcaccgcccagatttctcaagcagtgaccacaacccagcccagcctgacccagactacagtaatggagacagtcactaccgtgaccacccgggagcagatcctggtgaagcacgcccaggaagagctgccgcccccaccaccccagaaaaagcggaccctggagcgcctgcaggagctccaggaggccaccgacgaactggatctgaagctgaggcaggccgaggtgattaagggatcctggcagcctgtgggagacctgctgatcgacagcctgcaggatcatctggagaaagtcaaagctctgagaggggagatcgccccactgaaggagaacgtgagccacgtgaatgacctggctagacagctgaccaccttgggcattcagctgagtccttacaatctgtcaactctggaggatctgaacacccggtggaaactgctgcaggtggctgtggaagatcgggtgcgccagttacatgaggcccacagggactttggcccagcctcacagcactttctgtcaacctctgtgcaaggaccttgggagagagcaatcagcccaaacaaggtgccatattatatcaatcatgagactcagacaacttgctgggatcaccccaagatgacagaactctatcagtcactcgccgatctcaataatgtacggttctctgcctaccggacagctatgaagctgcggaggctgcagaaggcactctgtctggacctgctgagtctctctgcggcctgcgatgccctggatcaacataacctgaagcagaatgatcagcctatggacatcctgcagatcattaactgtctcaccacaatctacgatcggctggaacaggaacataacaacctggtgaatgtgccactgtgtgtggacatgtgcctgaattggctgctcaacgtctacgatacaggcaggactggcaggatccgcgtgctgagctttaaaaccggcatcatctctctgtgcaaagcccacctggaggacaaatatcggtacctgtttaagcaggtggcctccagcacaggcttctgtgatcagcgccggctgggcctgctgctgcacgacagcattcagatccctaggcagctgggcgaggtggcctccttcggcggctcaaacattgaacccagcgtgagatcttgctttcagtttgcaaataataaacccgagatcgaggccgccctgttcctggattggatgagactggagcctcagagtatggtgtggctgccagtgctgcatagagtggccgccgctgagacggccaagcaccaggcaaagtgcaatatctgcaaggaatgccccattattggctttcgataccggtccttgaaacacttcaattatgacatctgccagtcatgcttcttcagcggacgcgtggccaagggacacaagatgcattatcctatggtggaatactgcactccaactacttccggcgaggacgtgagagatttcgctaaagttcttaaaaacaaatttcggactaagaggtacttcgccaagcacccccgcatgggctatctgcctgtgcagacagtgcttgaaggagacaacatggaaaccgatacaatgtgatagattccggcctgattcacaacaccagctagatcagcggcctgattcacaacaccagctagacgcaggaataaaatatctttattttcattacatctgtgtgttggttttttgtgtgaggaacccctagtgatggagttggccactccctctctgcgcgctcgctcgctcactgaggccgggcgaccaaaggtcgcccgacgcccgggctttgcccgggcggcctcagtgagcgagcgagcgcgc

SEQ ID NO: 2426 - DNA, 4769 bp, synthetic construct
  source 1..4769: mol_type = other DNA
gcgcgctcgctcgctcactgaggccgcccgggcaaagcccgggcgtcgggcgacctttggtcgcccggcctcagtgagcgagcgagcgcgcagagagggagtggccaactccatcactaggggttcctcgtctgtctaattccagccaagggcatgggggaaaggacagagcccagggacctgtggcctattctctgagaggacgctgggctaataataggaggggagattagggagggatttgactgcattgttatctcacaggaatggcgtttgagagccttgcttccaagctcttccaagagtcatgccacccccctccaatctctgtggaagtgcccactgcctttcccgcttcgttctcttctctcggtcccatccctgacccactagcctggtgccggggggagaccaatttctggaggaagctctgggtacccagtcttgccctaagcctgcctctgaacaggctgttcttgtttatgacccccgtcccagcagaatagtgattgctcatccctgcatgtgatttgagagggccagtctttcaggcctggaggaaactcaagccccaccagccgcttggcatcggaatgctcagctggtcccctcctggggctcatgtgaccaagatctagctataaatatcagaggggcctcagaccaagacagaattcgggcaccaggagaaggaagccaacaggatccgacccggtgttttgtgacaaaggcaagacccccaggtctacttagagcaacgttagtagaggacagcccaggtacctgggcaggtaagtatcaaggttacaagacaggtttaaggagaccaatagaaactgggcttgtcgagacagagaagactcttgcgtttctgataggcacctattggtcttactgacatccactttgcctttctctccacaggtgtccagactagtgccaccatgctgtggtgggaagaggtcgaggactgctacgagcgcgaagatgtgcagaagaaaactttcactaaatgggtgaatgcccagttctctaagttcggaaagcagcacatcgaaaacctgttttccgatctgcaagatggccggcggctgctggacctgctggaggggctgaccggacagaagctgcctaaggagaaaggatctaccagggtccatgctctgaataacgtgaacaaggctctgagggtgctgcagaacaataacgtggacctggtgaacattggttccacagacatcgtggatggaaaccacaaactgacactgggactgatctggaacatcattctgcattggcaagtgaagaacgtgatgaagaacatcatggccggactgcagcagacgaactccgagaagatcctgcttagctgggtgagacagagtacccggaattacccacaggtgaacgtgatcaatttcacaaccagctggtcagacggcctggctctgaatgccctgattcatagccaccggccagatctgtttgactggaactctgtcgtgtgtcagcagtcagccacccagaggctggagcacgccttcaatattgcccgctatcagctggggattgagaaactgctggaccccgaggatgtggacacaacataccctgacaagaagagcatacttatgtatatcacaagcctgttccaggtgctgccacagcaggtctccatcgaggccattcaagaagtggagatgctgcccaggcctcctaaggtcaccaaagaggagcactttcagctccatcatcagatgcactacagccagcaaattaccgtgtccctggcccagggctacgagaggacaagttcccccaagcctagatttaagagctatgcctatacccaggccgcctacgtgactacctccgatcccaccaggagcccatttcccagccagcacctggaggctcccgaagataagagctttggcagcagcctgatggaatctgaggtgaacctggacagataccagactgcgctggaggaggtgctgtcctggctgctgagcgccgaggacaccctgcaggctcagggcgagattagtaatgatgtggaggtggtgaaggatcagtttcacactcacgaaggctacatgatggacctgaccgcccaccagggcagggtggggaacattctgcagctcgggagtaagctgatagggaccggcaaactgtccgaggatgaggaaaccgaggtgcaggagcagatgaacctgcttaactcccggtgggagtgtctgagagtggccagcatggagaagcagagcaatctgcacagagtgctgatggatctgcagaatcagaagctgaaggaactgaatgattggctcacaaagacagaggagaggactagaaagatggaggaggagcccctgggccctgacctggaggacctgaagcgacaggtgcagcagcacaaggtgctgcaggaggatctggagcaagaacaagtgagggtgaactctctgactcatatggttgtggtggtggacgagtcttccggagaccacgcaactgccgccctcgaggagcagctgaaggtgctgggcgataggtgggctaatatctgtaggtggaccgaggacagatgggtgctgctgcaggatatcctgctgaaatggcagcgcctgacagaagagcagtgtctgttcagcgcatggctgagcgaaaaggaggacgctgtgaacaagatccacactacaggatttaaagaccagaacgagatgctgagtagcctgcagaagctggctgtgctgaaggctgatttggagaaaaagaagcagagcatgggcaagctgtactccctgaaacaggacctgctgagcaccctgaagaataagtccgtgacccagaaaaccgaagcttggctggacaacttcgcgcgctgctgggataacctggtgcagaagctggagaagagcaccgcccagatttctcaagcagtgaccacaacccagcccagcctgacccagactacagtaatggagacagtcactaccgtgaccacccgggagcagatcctggtgaagcacgcccaggaagagctgccgcccccaccaccccagaaaaagcggaccctggagcgcctgcaggagctccaggaggccaccgacgaactggatctgaagctgaggcaggccgaggtgattaagggatcctggcagcctgtgggagacctgctgatcgacagcctgcaggatcatctggagaaagtcaaagctctgagaggggagatcgccccactgaaggagaacgtgagccacgtgaatgacctggctagacagctgaccaccttgggcattcagctgagtccttacaatctgtcaactctggaggatctgaacacccggtggaaactgctgcaggtggctgtggaagatcgggtgcgccagttacatgaggcccacagggactttggcccagcctcacagcactttctgtcaacctctgtgcaaggaccttgggagagagcaatcagcccaaacaaggtgccatattatatcaatcatgagactcagacaacttgctgggatcaccccaagatgacagaactctatcagtcactcgccgatctcaataatgtacggttctctgcctaccggacagctatgaagctgcggaggctgcagaaggcactctgtctggacctgctgagtctctctgcggcctgcgatgccctggatcaacataacctgaagcagaatgatcagcctatggacatcctgcagatcattaactgtctcaccacaatctacgatcggctggaacaggaacataacaacctggtgaatgtgccactgtgtgtggacatgtgcctgaattggctgctcaacgtctacgatacaggcaggactggcaggatccgcgtgctgagctttaaaaccggcatcatctctctgtgcaaagcccacctggaggacaaatatcggtacctgtttaagcaggtggcctccagcacaggcttctgtgatcagcgccggctgggcctgctgctgcacgacagcattcagatccctaggcagctgggcgaggtggcctccttcggcggctcaaacattgaacccagcgtgagatcttgctttcagtttgcaaataataaacccgagatcgaggccgccctgttcctggattggatgagactggagcctcagagtatggtgtggctgccagtgctgcatagagtggccgccgctgagacggccaagcaccaggcaaagtgcaatatctgcaaggaatgccccattattggctttcgataccggtccttgaaacacttcaattatgacatctgccagtcatgcttcttcagcggacgcgtggccaagggacacaagatgcattatcctatggtggaatactgcactccaactacttccggcgaggacgtgagagatttcgctaaagttcttaaaaacaaatttcggactaagaggtacttcgccaagcacccccgcatgggctatctgcctgtgcagacagtgcttgaaggagacaacatggaaaccgatacaatgtgatagattccggcctgattcacaacaccagctagatcagcggcctgattcacaacaccagctagacgcaggaataaaatatctttattttcattacatctgtgtgttggttttttgtgtgaggaacccctagtgatggagttggccactccctctctgcgcgctcgctcgctcactgaggccgggcgaccaaaggtcgcccgacgcccgggctttgcccgggcggcctcagtgagcgagcgagcgcgc

SEQ ID NO: 2427 - DNA, 4809 bp, synthetic construct
  source 1..4809: mol_type = other DNA
gcgcgctcgctcgctcactgaggccgcccgggcaaagcccgggcgtcgggcgacctttggtcgcccggcctcagtgagcgagcgagcgcgcagagagggagtggccaactccatcactaggggttccttagttattaatagtaatcaattacggggtcattagttcatagcccatatatggagttccgcgttacataacttacggtaaatggcccgcctggctgaccgcccaacgacccccgcccattgacgtcaataatgacgtatgttcccatagtaacgccaatagggactttccattgacgtcaatgggtggagtatttacggtaaactgcccacttggcagtacatcaagtgtatcatatgccaagtacgccccctattgacgtcaatgacggtaaatggcccgcctggcattatgcccagtacatgaccttatgggactttcctacttggcagtacatctacgtattagtcatcgctattaccatgctagactagcatgctgcccatgtaaggaggcaaggcctggggacacccgagatgcctggttataattaacccagacatgtggctgccccccccccccaacacctgctgcctctaaaaataaccctgcatgccatgttcccggcgaagggccagctgtcccccgccagctagactcagctctcaggggcccctccctggggacagcccctcctggctagtcacaccctgtaggctcctctatataacccaggggcacaggggctgccctcattctaccaccacctccacagcacagacagacactcaggagccagccagccagcccaggtacctgggcaggtaagtatcaaggttacaagacaggtttaaggagaccaatagaaactgggcttgtcgagacagagaagactcttgcgtttctgataggcacctattggtcttactgacatccactttgcctttctctccacaggtgtccagactagtgccaccatgctgtggtgggaagaggtcgaggactgctacgagcgcgaagatgtgcagaagaaaactttcactaaatgggtgaatgcccagttctctaagttcggaaagcagcacatcgaaaacctgttttccgatctgcaagatggccggcggctgctggacctgctggaggggctgaccggacagaagctgcctaaggagaaaggatctaccagggtccatgctctgaataacgtgaacaaggctctgagggtgctgcagaacaataacgtggacctggtgaacattggttccacagacatcgtggatggaaaccacaaactgacactgggactgatctggaacatcattctgcattggcaagtgaagaacgtgatgaagaacatcatggccggactgcagcagacgaactccgagaagatcctgcttagctgggtgagacagagtacccggaattacccacaggtgaacgtgatcaatttcacaaccagctggtcagacggcctggctctgaatgccctgattcatagccaccggccagatctgtttgactggaactctgtcgtgtgtcagcagtcagccacccagaggctggagcacgccttcaatattgcccgctatcagctggggattgagaaactgctggaccccgaggatgtggacacaacataccctgacaagaagagcatacttatgtatatcacaagcctgttccaggtgctgccacagcaggtctccatcgaggccattcaagaagtggagatgctgcccaggcctcctaaggtcaccaaagaggagcactttcagctccatcatcagatgcactacagccagcaaattaccgtgtccctggcccagggctacgagaggacaagttcccccaagcctagatttaagagctatgcctatacccaggccgcctacgtgactacctccgatcccaccaggagcccatttcccagccagcacctggaggctcccgaagataagagctttggcagcagcctgatggaatctgaggtgaacctggacagataccagactgcgctggaggaggtgctgtcctggctgctgagcgccgaggacaccctgcaggctcagggcgagattagtaatgatgtggaggtggtgaaggatcagtttcacactcacgaaggctacatgatggacctgaccgcccaccagggcagggtggggaacattctgcagctcgggagtaagctgatagggaccggcaaactgtccgaggatgaggaaaccgaggtgcaggagcagatgaacctgcttaactcccggtgggagtgtctgagagtggccagcatggagaagcagagcaatctgcacagagtgctgatggatctgcagaatcagaagctgaaggaactgaatgattggctcacaaagacagaggagaggactagaaagatggaggaggagcccctgggccctgacctggaggacctgaagcgacaggtgcagcagcacaaggtgctgcaggaggatctggagcaagaacaagtgagggtgaactctctgactcatatggttgtggtggtggacgagtcttccggagaccacgcaactgccgccctcgaggagcagctgaaggtgctgggcgataggtgggctaatatctgtaggtggaccgaggacagatgggtgctgctgcaggatatcctgctgaaatggcagcgcctgacagaagagcagtgtctgttcagcgcatggctgagcgaaaaggaggacgctgtgaacaagatccacactacaggatttaaagaccagaacgagatgctgagtagcctgcagaagctggctgtgctgaaggctgatttggagaaaaagaagcagagcatgggcaagctgtactccctgaaacaggacctgctgagcaccctgaagaataagtccgtgacccagaaaaccgaagcttggctggacaacttcgcgcgctgctgggataacctggtgcagaagctggagaagagcaccgcccagatttctcaagcagtgaccacaacccagcccagcctgacccagactacagtaatggagacagtcactaccgtgaccacccgggagcagatcctggtgaagcacgcccaggaagagctgccgcccccaccaccccagaaaaagcggaccctggagcgcctgcaggagctccaggaggccaccgacgaactggatctgaagctgaggcaggccgaggtgattaagggatcctggcagcctgtgggagacctgctgatcgacagcctgcaggatcatctggagaaagtcaaagctctgagaggggagatcgccccactgaaggagaacgtgagccacgtgaatgacctggctagacagctgaccaccttgggcattcagctgagtccttacaatctgtcaactctggaggatctgaacacccggtggaaactgctgcaggtggctgtggaagatcgggtgcgccagttacatgaggcccacagggactttggcccagcctcacagcactttctgtcaacctctgtgcaaggaccttgggagagagcaatcagcccaaacaaggtgccatattatatcaatcatgagactcagacaacttgctgggatcaccccaagatgacagaactctatcagtcactcgccgatctcaataatgtacggttctctgcctaccggacagctatgaagctgcggaggctgcagaaggcactctgtctggacctgctgagtctctctgcggcctgcgatgccctggatcaacataacctgaagcagaatgatcagcctatggacatcctgcagatcattaactgtctcaccacaatctacgatcggctggaacaggaacataacaacctggtgaatgtgccactgtgtgtggacatgtgcctgaattggctgctcaacgtctacgatacaggcaggactggcaggatccgcgtgctgagctttaaaaccggcatcatctctctgtgcaaagcccacctggaggacaaatatcggtacctgtttaagcaggtggcctccagcacaggcttctgtgatcagcgccggctgggcctgctgctgcacgacagcattcagatccctaggcagctgggcgaggtggcctccttcggcggctcaaacattgaacccagcgtgagatcttgctttcagtttgcaaataataaacccgagatcgaggccgccctgttcctggattggatgagactggagcctcagagtatggtgtggctgccagtgctgcatagagtggccgccgctgagacggccaagcaccaggcaaagtgcaatatctgcaaggaatgccccattattggctttcgataccggtccttgaaacacttcaattatgacatctgccagtcatgcttcttcagcggacgcgtggccaagggacacaagatgcattatcctatggtggaatactgcactccaactacttccggcgaggacgtgagagatttcgctaaagttcttaaaaacaaatttcggactaagaggtacttcgccaagcacccccgcatgggctatctgcctgtgcagacagtgcttgaaggagacaacatggaaaccgatacaatgtgatagattctcatacagctagataaccaaagaagatcagtcatacagctagataaccaaagaagacgcaggaataaaatatctttattttcattacatctgtgtgttggttttttgtgtgaggaacccctagtgatggagttggccactccctctctgcgcgctcgctcgctcactgaggccgggcgaccaaaggtcgcccgacgcccgggctttgcccgggcggcctcagtgagcgagcgagcgcgc

SEQ ID NO: 2428 - DNA, 4769 bp, synthetic construct
  source 1..4769: mol_type = other DNA
gcgcgctcgctcgctcactgaggccgcccgggcaaagcccgggcgtcgggcgacctttggtcgcccggcctcagtgagcgagcgagcgcgcagagagggagtggccaactccatcactaggggttcctcgtctgtctaattccagccaagggcatgggggaaaggacagagcccagggacctgtggcctattctctgagaggacgctgggctaataataggaggggagattagggagggatttgactgcattgttatctcacaggaatggcgtttgagagccttgcttccaagctcttccaagagtcatgccacccccctccaatctctgtggaagtgcccactgcctttcccgcttcgttctcttctctctaaatctgagcccaccccactcaggggtacaggatctggttcatttatctcccagaatgatgccttgggttgcgtcccctctaaactctggcacattccagcccctctttgggagaaagaacatctcttcttgcccaggccctagtgagacatgcatcgcaagacatgctccccccttcctccccgctgggctccagctgctgccagccctccaagaaaggagaggccctgagttgggctattttggtatctggggtgggcacccgcagggctaaggttaccttggtatgttaagggctccctggggcaggactatataaccccagagggactgccccatgctgactccttgcttctttcctgctcgagccgctgccttgccccccggagactgaagacacagcccaggtacctgggcaggtaagtatcaaggttacaagacaggtttaaggagaccaatagaaactgggcttgtcgagacagagaagactcttgcgtttctgataggcacctattggtcttactgacatccactttgcctttctctccacaggtgtccagactagtgccaccatgctgtggtgggaagaggtcgaggactgctacgagcgcgaagatgtgcagaagaaaactttcactaaatgggtgaatgcccagttctctaagttcggaaagcagcacatcgaaaacctgttttccgatctgcaagatggccggcggctgctggacctgctggaggggctgaccggacagaagctgcctaaggagaaaggatctaccagggtccatgctctgaataacgtgaacaaggctctgagggtgctgcagaacaataacgtggacctggtgaacattggttccacagacatcgtggatggaaaccacaaactgacactgggactgatctggaacatcattctgcattggcaagtgaagaacgtgatgaagaacatcatggccggactgcagcagacgaactccgagaagatcctgcttagctgggtgagacagagtacccggaattacccacaggtgaacgtgatcaatttcacaaccagctggtcagacggcctggctctgaatgccctgattcatagccaccggccagatctgtttgactggaactctgtcgtgtgtcagcagtcagccacccagaggctggagcacgccttcaatattgcccgctatcagctggggattgagaaactgctggaccccgaggatgtggacacaacataccctgacaagaagagcatacttatgtatatcacaagcctgttccaggtgctgccacagcaggtctccatcgaggccattcaagaagtggagatgctgcccaggcctcctaaggtcaccaaagaggagcactttcagctccatcatcagatgcactacagccagcaaattaccgtgtccctggcccagggctacgagaggacaagttcccccaagcctagatttaagagctatgcctatacccaggccgcctacgtgactacctccgatcccaccaggagcccatttcccagccagcacctggaggctcccgaagataagagctttggcagcagcctgatggaatctgaggtgaacctggacagataccagactgcgctggaggaggtgctgtcctggctgctgagcgccgaggacaccctgcaggctcagggcgagattagtaatgatgtggaggtggtgaaggatcagtttcacactcacgaaggctacatgatggacctgaccgcccaccagggcagggtggggaacattctgcagctcgggagtaagctgatagggaccggcaaactgtccgaggatgaggaaaccgaggtgcaggagcagatgaacctgcttaactcccggtgggagtgtctgagagtggccagcatggagaagcagagcaatctgcacagagtgctgatggatctgcagaatcagaagctgaaggaactgaatgattggctcacaaagacagaggagaggactagaaagatggaggaggagcccctgggccctgacctggaggacctgaagcgacaggtgcagcagcacaaggtgctgcaggaggatctggagcaagaacaagtgagggtgaactctctgactcatatggttgtggtggtggacgagtcttccggagaccacgcaactgccgccctcgaggagcagctgaaggtgctgggcgataggtgggctaatatctgtaggtggaccgaggacagatgggtgctgctgcaggatatcctgctgaaatggcagcgcctgacagaagagcagtgtctgttcagcgcatggctgagcgaaaaggaggacgctgtgaacaagatccacactacaggatttaaagaccagaacgagatgctgagtagcctgcagaagctggctgtgctgaaggctgatttggagaaaaagaagcagagcatgggcaagctgtactccctgaaacaggacctgctgagcaccctgaagaataagtccgtgacccagaaaaccgaagcttggctggacaacttcgcgcgctgctgggataacctggtgcagaagctggagaagagcaccgcccagatttctcaagcagtgaccacaacccagcccagcctgacccagactacagtaatggagacagtcactaccgtgaccacccgggagcagatcctggtgaagcacgcccaggaagagctgccgcccccaccaccccagaaaaagcggaccctggagcgcctgcaggagctccaggaggccaccgacgaactggatctgaagctgaggcaggccgaggtgattaagggatcctggcagcctgtgggagacctgctgatcgacagcctgcaggatcatctggagaaagtcaaagctctgagaggggagatcgccccactgaaggagaacgtgagccacgtgaatgacctggctagacagctgaccaccttgggcattcagctgagtccttacaatctgtcaactctggaggatctgaacacccggtggaaactgctgcaggtggctgtggaagatcgggtgcgccagttacatgaggcccacagggactttggcccagcctcacagcactttctgtcaacctctgtgcaaggaccttgggagagagcaatcagcccaaacaaggtgccatattatatcaatcatgagactcagacaacttgctgggatcaccccaagatgacagaactctatcagtcactcgccgatctcaataatgtacggttctctgcctaccggacagctatgaagctgcggaggctgcagaaggcactctgtctggacctgctgagtctctctgcggcctgcgatgccctggatcaacataacctgaagcagaatgatcagcctatggacatcctgcagatcattaactgtctcaccacaatctacgatcggctggaacaggaacataacaacctggtgaatgtgccactgtgtgtggacatgtgcctgaattggctgctcaacgtctacgatacaggcaggactggcaggatccgcgtgctgagctttaaaaccggcatcatctctctgtgcaaagcccacctggaggacaaatatcggtacctgtttaagcaggtggcctccagcacaggcttctgtgatcagcgccggctgggcctgctgctgcacgacagcattcagatccctaggcagctgggcgaggtggcctccttcggcggctcaaacattgaacccagcgtgagatcttgctttcagtttgcaaataataaacccgagatcgaggccgccctgttcctggattggatgagactggagcctcagagtatggtgtggctgccagtgctgcatagagtggccgccgctgagacggccaagcaccaggcaaagtgcaatatctgcaaggaatgccccattattggctttcgataccggtccttgaaacacttcaattatgacatctgccagtcatgcttcttcagcggacgcgtggccaagggacacaagatgcattatcctatggtggaatactgcactccaactacttccggcgaggacgtgagagatttcgctaaagttcttaaaaacaaatttcggactaagaggtacttcgccaagcacccccgcatgggctatctgcctgtgcagacagtgcttgaaggagacaacatggaaaccgatacaatgtgatagattctcatacagctagataaccaaagaagatcagtcatacagctagataaccaaagaagacgcaggaataaaatatctttattttcattacatctgtgtgttggttttttgtgtgaggaacccctagtgatggagttggccactccctctctgcgcgctcgctcgctcactgaggccgggcgaccaaaggtcgcccgacgcccgggctttgcccgggcggcctcagtgagcgagcgagcgcgc

SEQ ID NO: 2429 - DNA, 4769 bp, synthetic construct
  source 1..4769: mol_type = other DNA
gcgcgctcgctcgctcactgaggccgcccgggcaaagcccgggcgtcgggcgacctttggtcgcccggcctcagtgagcgagcgagcgcgcagagagggagtggccaactccatcactaggggttcctcgtctgtctaattccagccaagggcatgggggaaaggacagagcccagggacctgtggcctattctctgagaggacgctgggctaataataggaggggagattagggagggatttgactgcattgttatctcacaggaatggcgtttgagagccttgcttccaagctcttccaagagtcatgccacccccctccaatctctgtggaagtgcccactgcctttcccgcttcgttctcttctctcggtcccatccctgacccactagcctggtgccggggggagaccaatttctggaggaagctctgggtacccagtcttgccctaagcctgcctctgaacaggctgttcttgtttatgacccccgtcccagcagaatagtgattgctcatccctgcatgtgatttgagagggccagtctttcaggcctggaggaaactcaagccccaccagccgcttggcatcggaatgctcagctggtcccctcctggggctcatgtgaccaagatctagctataaatatcagaggggcctcagaccaagacagaattcgggcaccaggagaaggaagccaacaggatccgacccggtgttttgtgacaaaggcaagacccccaggtctacttagagcaacgttagtagaggacagcccaggtacctgggcaggtaagtatcaaggttacaagacaggtttaaggagaccaatagaaactgggcttgtcgagacagagaagactcttgcgtttctgataggcacctattggtcttactgacatccactttgcctttctctccacaggtgtccagactagtgccaccatgctgtggtgggaagaggtcgaggactgctacgagcgcgaagatgtgcagaagaaaactttcactaaatgggtgaatgcccagttctctaagttcggaaagcagcacatcgaaaacctgttttccgatctgcaagatggccggcggctgctggacctgctggaggggctgaccggacagaagctgcctaaggagaaaggatctaccagggtccatgctctgaataacgtgaacaaggctctgagggtgctgcagaacaataacgtggacctggtgaacattggttccacagacatcgtggatggaaaccacaaactgacactgggactgatctggaacatcattctgcattggcaagtgaagaacgtgatgaagaacatcatggccggactgcagcagacgaactccgagaagatcctgcttagctgggtgagacagagtacccggaattacccacaggtgaacgtgatcaatttcacaaccagctggtcagacggcctggctctgaatgccctgattcatagccaccggccagatctgtttgactggaactctgtcgtgtgtcagcagtcagccacccagaggctggagcacgccttcaatattgcccgctatcagctggggattgagaaactgctggaccccgaggatgtggacacaacataccctgacaagaagagcatacttatgtatatcacaagcctgttccaggtgctgccacagcaggtctccatcgaggccattcaagaagtggagatgctgcccaggcctcctaaggtcaccaaagaggagcactttcagctccatcatcagatgcactacagccagcaaattaccgtgtccctggcccagggctacgagaggacaagttcccccaagcctagatttaagagctatgcctatacccaggccgcctacgtgactacctccgatcccaccaggagcccatttcccagccagcacctggaggctcccgaagataagagctttggcagcagcctgatggaatctgaggtgaacctggacagataccagactgcgctggaggaggtgctgtcctggctgctgagcgccgaggacaccctgcaggctcagggcgagattagtaatgatgtggaggtggtgaaggatcagtttcacactcacgaaggctacatgatggacctgaccgcccaccagggcagggtggggaacattctgcagctcgggagtaagctgatagggaccggcaaactgtccgaggatgaggaaaccgaggtgcaggagcagatgaacctgcttaactcccggtgggagtgtctgagagtggccagcatggagaagcagagcaatctgcacagagtgctgatggatctgcagaatcagaagctgaaggaactgaatgattggctcacaaagacagaggagaggactagaaagatggaggaggagcccctgggccctgacctggaggacctgaagcgacaggtgcagcagcacaaggtgctgcaggaggatctggagcaagaacaagtgagggtgaactctctgactcatatggttgtggtggtggacgagtcttccggagaccacgcaactgccgccctcgaggagcagctgaaggtgctgggcgataggtgggctaatatctgtaggtggaccgaggacagatgggtgctgctgcaggatatcctgctgaaatggcagcgcctgacagaagagcagtgtctgttcagcgcatggctgagcgaaaaggaggacgctgtgaacaagatccacactacaggatttaaagaccagaacgagatgctgagtagcctgcagaagctggctgtgctgaaggctgatttggagaaaaagaagcagagcatgggcaagctgtactccctgaaacaggacctgctgagcaccctgaagaataagtccgtgacccagaaaaccgaagcttggctggacaacttcgcgcgctgctgggataacctggtgcagaagctggagaagagcaccgcccagatttctcaagcagtgaccacaacccagcccagcctgacccagactacagtaatggagacagtcactaccgtgaccacccgggagcagatcctggtgaagcacgcccaggaagagctgccgcccccaccaccccagaaaaagcggaccctggagcgcctgcaggagctccaggaggccaccgacgaactggatctgaagctgaggcaggccgaggtgattaagggatcctggcagcctgtgggagacctgctgatcgacagcctgcaggatcatctggagaaagtcaaagctctgagaggggagatcgccccactgaaggagaacgtgagccacgtgaatgacctggctagacagctgaccaccttgggcattcagctgagtccttacaatctgtcaactctggaggatctgaacacccggtggaaactgctgcaggtggctgtggaagatcgggtgcgccagttacatgaggcccacagggactttggcccagcctcacagcactttctgtcaacctctgtgcaaggaccttgggagagagcaatcagcccaaacaaggtgccatattatatcaatcatgagactcagacaacttgctgggatcaccccaagatgacagaactctatcagtcactcgccgatctcaataatgtacggttctctgcctaccggacagctatgaagctgcggaggctgcagaaggcactctgtctggacctgctgagtctctctgcggcctgcgatgccctggatcaacataacctgaagcagaatgatcagcctatggacatcctgcagatcattaactgtctcaccacaatctacgatcggctggaacaggaacataacaacctggtgaatgtgccactgtgtgtggacatgtgcctgaattggctgctcaacgtctacgatacaggcaggactggcaggatccgcgtgctgagctttaaaaccggcatcatctctctgtgcaaagcccacctggaggacaaatatcggtacctgtttaagcaggtggcctccagcacaggcttctgtgatcagcgccggctgggcctgctgctgcacgacagcattcagatccctaggcagctgggcgaggtggcctccttcggcggctcaaacattgaacccagcgtgagatcttgctttcagtttgcaaataataaacccgagatcgaggccgccctgttcctggattggatgagactggagcctcagagtatggtgtggctgccagtgctgcatagagtggccgccgctgagacggccaagcaccaggcaaagtgcaatatctgcaaggaatgccccattattggctttcgataccggtccttgaaacacttcaattatgacatctgccagtcatgcttcttcagcggacgcgtggccaagggacacaagatgcattatcctatggtggaatactgcactccaactacttccggcgaggacgtgagagatttcgctaaagttcttaaaaacaaatttcggactaagaggtacttcgccaagcacccccgcatgggctatctgcctgtgcagacagtgcttgaaggagacaacatggaaaccgatacaatgtgatagattctcatacagctagataaccaaagaagatcagtcatacagctagataaccaaagaagacgcaggaataaaatatctttattttcattacatctgtgtgttggttttttgtgtgaggaacccctagtgatggagttggccactccctctctgcgcgctcgctcgctcactgaggccgggcgaccaaaggtcgcccgacgcccgggctttgcccgggcggcctcagtgagcgagcgagcgcgc

SEQ ID NO: 2430 - DNA, 4807 bp, synthetic construct
  source 1..4807: mol_type = other DNA
gcgcgctcgctcgctcactgaggccgcccgggcaaagcccgggcgtcgggcgacctttggtcgcccggcctcagtgagcgagcgagcgcgcagagagggagtggccaactccatcactaggggttccttagttattaatagtaatcaattacggggtcattagttcatagcccatatatggagttccgcgttacataacttacggtaaatggcccgcctggctgaccgcccaacgacccccgcccattgacgtcaataatgacgtatgttcccatagtaacgccaatagggactttccattgacgtcaatgggtggagtatttacggtaaactgcccacttggcagtacatcaagtgtatcatatgccaagtacgccccctattgacgtcaatgacggtaaatggcccgcctggcattatgcccagtacatgaccttatgggactttcctacttggcagtacatctacgtattagtcatcgctattaccatgctagactagcatgctgcccatgtaaggaggcaaggcctggggacacccgagatgcctggttataattaacccagacatgtggctgccccccccccccaacacctgctgcctctaaaaataaccctgcatgccatgttcccggcgaagggccagctgtcccccgccagctagactcagctctcaggggcccctccctggggacagcccctcctggctagtcacaccctgtaggctcctctatataacccaggggcacaggggctgccctcattctaccaccacctccacagcacagacagacactcaggagccagccagccagcccaggtacctgggcaggtaagtatcaaggttacaagacaggtttaaggagaccaatagaaactgggcttgtcgagacagagaagactcttgcgtttctgataggcacctattggtcttactgacatccactttgcctttctctccacaggtgtccagactagtgccaccatgctgtggtgggaggaggtggaggattgctacgagagagaggacgtgcagaagaaaaccttcaccaaatgggtgaacgcccagttcagcaagtttggcaagcagcacatcgagaacctgttcagcgatctgcaggacggccgcaggctgctggatctgctggagggtctgaccggccagaaactgcccaaagagaagggatcaaccagggtgcacgccctgaataatgtgaacaaggccctgagagtgctgcaaaataataatgtggatctggtgaacatcggatctaccgatattgtggacggcaaccataagctgactctgggcctgatctggaatatcatcctgcactggcaggtgaaaaatgtgatgaaaaacatcatggccgggctgcagcagaccaactctgagaagatcctgctgagctgggtgaggcagtctacaagaaattacccccaggtgaacgtgatcaatttcaccaccagctggtccgacgggctggctctgaatgccctgattcacagccaccggcccgacctgttcgactggaattccgtggtgtgccagcagagcgccacacagagactggagcacgctttcaatatcgctcggtatcagctgggcatcgagaagctgctggaccccgaggacgtggacactacttaccccgataaaaagagcatcctgatgtatatcacctccctgttccaagtgctgccccagcaggtctccatcgaggccatccaggaggtggaaatgctgccccggcccccaaaggtgacaaaggaagaacacttccagctccaccaccagatgcactactctcagcagatcaccgtgagcctggcccaggggtacgagcggacctcttctccaaagccccgcttcaagagctatgcctatacccaggccgcctatgtgaccacctccgatcccacccgctcacccttcccttctcaacacctggaagccccagaggacaagtccttcggcagttctctgatggagtctgaggtgaacctggatagatatcagactgccctggaggaggtgctgtcttggctgctctccgccgaggacaccctgcaggcacagggcgagatctccaacgatgtggaggtggtgaaggaccagttccacacacacgagggctatatgatggacctgactgcccatcagggcagagtgggcaatatcctgcagctgggttccaaactgataggcaccggaaagctgagcgaagacgaggagaccgaggtgcaggagcagatgaatctgctgaactcccggtgggagtgcctgcgagtcgccagcatggaaaagcagagcaacctgcaccgcgtgctcatggatctgcagaatcagaagctgaaggagctgaatgactggctgaccaagaccgaagagcgcaccaggaagatggaggaggagccactgggccccgatctggaggacctgaaaagacaggtgcagcagcataaagtgctgcaggaggacctggagcaggaacaagtgagagtgaattctctgacacacatggtggtggtggtggacgagagcagcggcgaccacgcaacagccgccctggaggagcagctgaaagtgctgggagaccggtgggccaacatttgccggtggaccgaggaccgctgggtgctgctgcaggacattctgctgaagtggcagcggctgaccgaagagcagtgcctgttctccgcctggctgagcgagaaggaggacgccgtgaataagatccacaccaccgggttcaaggaccagaatgagatgctgtccagcctgcagaagctggccgtgctgaaggccgatctggaaaagaagaagcagagcatgggaaagctgtatagcctgaagcaggacctgctgtctactctgaaaaacaagtcagtgacccagaagaccgaggcctggctggacaacttcgcccgctgctgggacaacctggtgcagaagctggaaaagagcaccgcccagatcagccaggcagtgactaccacacagccctccctgacacagactactgtgatggagaccgtgacaacagtgaccacaagggagcagatcctggtgaagcacgcccaggaagaactgccccctccaccccctcagaagaagagaactctggaaagactgcaggagctgcaggaggccactgacgagctggacctgaagctgcggcaggccgaggtgattaagggcagctggcagcctgtgggcgatctgctgatcgacagcctgcaggaccacctggagaaggtgaaagccctgcggggcgagatcgcccctctgaaggagaacgtcagccatgtgaatgacctggccagacagctgaccacactggggattcagctgtctccttacaatctgtcaaccctggaggacctgaacactcgctggaagctgctgcaggtggccgtggaggacagggtgcggcagctgcacgaagcccatcgcgactttgggcccgcctctcagcactttctgagcacctccgtgcagggaccctgggagcgggcaatcagcccaaacaaggtgccatactacatcaaccacgagacccagaccacctgttgggatcaccccaagatgacagagctgtaccagtctctggctgacctgaacaacgtgcggttctcagcctacaggaccgccatgaagctgcggagactgcagaaggccctgtgcctggatctgctgagcctctccgctgcttgtgacgccctggatcagcacaacctgaaacagaacgaccagccaatggacatcctgcagattattaattgcctgacaaccatctatgatcggctggaacaggagcacaataatctggtgaacgtgccactgtgcgtggacatgtgcctgaattggctgctgaacgtgtacgacacaggacggaccggcagaatcagagtgctgtcttttaagaccgggatcatcagcctgtgcaaagcccacctggaggacaagtaccggtatctgttcaaacaagtggcctccagcaccggcttttgcgaccagcgcaggctgggcctgctgctccacgactccatccagatccctagacagctgggcgaggtggcttcttttggcggatccaatatcgagcccagtgtgcggagctgttttcagtttgctaataataagcctgagatcgaggccgctctgttcctggactggatgagactggagccccagtccatggtgtggctgccagtgctgcacagggtcgccgccgcagagactgccaagcaccaggccaagtgcaacatctgcaaagaatgcccaatcattggctttagataccggagcctcaaacactttaactacgacatctgccagagctgcttcttctccggccgggtggccaagggccacaagatgcactaccccatggtggagtactgtaccccaaccacttccggcgaggacgtgagagatttcgccaaggtgctgaagaacaagttccggacaaagagatactttgcaaaacacccaagaatgggctacctgccagtgcagaccgtgctggagggggacaatatggagacagacacaatgtgatagattccaacaaaatcactgatgctggaagatcagcaacaaaatcactgatgctggaagacgcaggaataaaatatctttattttcattacatctgtgtgttggttttttgtgtgaggaacccctagtgatggagttggccactccctctctgcgcgctcgctcgctcactgaggccgggcgaccaaaggtcgcccgacgcccgggctttgcccgggcggcctcagtgagcgagcgagcgcgc

SEQ ID NO: 2431 - DNA, 4767 bp, synthetic construct
  source 1..4767: mol_type = other DNA
gcgcgctcgctcgctcactgaggccgcccgggcaaagcccgggcgtcgggcgacctttggtcgcccggcctcagtgagcgagcgagcgcgcagagagggagtggccaactccatcactaggggttcctcgtctgtctaattccagccaagggcatgggggaaaggacagagcccagggacctgtggcctattctctgagaggacgctgggctaataataggaggggagattagggagggatttgactgcattgttatctcacaggaatggcgtttgagagccttgcttccaagctcttccaagagtcatgccacccccctccaatctctgtggaagtgcccactgcctttcccgcttcgttctcttctctctaaatctgagcccaccccactcaggggtacaggatctggttcatttatctcccagaatgatgccttgggttgcgtcccctctaaactctggcacattccagcccctctttgggagaaagaacatctcttcttgcccaggccctagtgagacatgcatcgcaagacatgctccccccttcctccccgctgggctccagctgctgccagccctccaagaaaggagaggccctgagttgggctattttggtatctggggtgggcacccgcagggctaaggttaccttggtatgttaagggctccctggggcaggactatataaccccagagggactgccccatgctgactccttgcttctttcctgctcgagccgctgccttgccccccggagactgaagacacagcccaggtacctgggcaggtaagtatcaaggttacaagacaggtttaaggagaccaatagaaactgggcttgtcgagacagagaagactcttgcgtttctgataggcacctattggtcttactgacatccactttgcctttctctccacaggtgtccagactagtgccaccatgctgtggtgggaggaggtggaggattgctacgagagagaggacgtgcagaagaaaaccttcaccaaatgggtgaacgcccagttcagcaagtttggcaagcagcacatcgagaacctgttcagcgatctgcaggacggccgcaggctgctggatctgctggagggtctgaccggccagaaactgcccaaagagaagggatcaaccagggtgcacgccctgaataatgtgaacaaggccctgagagtgctgcaaaataataatgtggatctggtgaacatcggatctaccgatattgtggacggcaaccataagctgactctgggcctgatctggaatatcatcctgcactggcaggtgaaaaatgtgatgaaaaacatcatggccgggctgcagcagaccaactctgagaagatcctgctgagctgggtgaggcagtctacaagaaattacccccaggtgaacgtgatcaatttcaccaccagctggtccgacgggctggctctgaatgccctgattcacagccaccggcccgacctgttcgactggaattccgtggtgtgccagcagagcgccacacagagactggagcacgctttcaatatcgctcggtatcagctgggcatcgagaagctgctggaccccgaggacgtggacactacttaccccgataaaaagagcatcctgatgtatatcacctccctgttccaagtgctgccccagcaggtctccatcgaggccatccaggaggtggaaatgctgccccggcccccaaaggtgacaaaggaagaacacttccagctccaccaccagatgcactactctcagcagatcaccgtgagcctggcccaggggtacgagcggacctcttctccaaagccccgcttcaagagctatgcctatacccaggccgcctatgtgaccacctccgatcccacccgctcacccttcccttctcaacacctggaagccccagaggacaagtccttcggcagttctctgatggagtctgaggtgaacctggatagatatcagactgccctggaggaggtgctgtcttggctgctctccgccgaggacaccctgcaggcacagggcgagatctccaacgatgtggaggtggtgaaggaccagttccacacacacgagggctatatgatggacctgactgcccatcagggcagagtgggcaatatcctgcagctgggttccaaactgataggcaccggaaagctgagcgaagacgaggagaccgaggtgcaggagcagatgaatctgctgaactcccggtgggagtgcctgcgagtcgccagcatggaaaagcagagcaacctgcaccgcgtgctcatggatctgcagaatcagaagctgaaggagctgaatgactggctgaccaagaccgaagagcgcaccaggaagatggaggaggagccactgggccccgatctggaggacctgaaaagacaggtgcagcagcataaagtgctgcaggaggacctggagcaggaacaagtgagagtgaattctctgacacacatggtggtggtggtggacgagagcagcggcgaccacgcaacagccgccctggaggagcagctgaaagtgctgggagaccggtgggccaacatttgccggtggaccgaggaccgctgggtgctgctgcaggacattctgctgaagtggcagcggctgaccgaagagcagtgcctgttctccgcctggctgagcgagaaggaggacgccgtgaataagatccacaccaccgggttcaaggaccagaatgagatgctgtccagcctgcagaagctggccgtgctgaaggccgatctggaaaagaagaagcagagcatgggaaagctgtatagcctgaagcaggacctgctgtctactctgaaaaacaagtcagtgacccagaagaccgaggcctggctggacaacttcgcccgctgctgggacaacctggtgcagaagctggaaaagagcaccgcccagatcagccaggcagtgactaccacacagccctccctgacacagactactgtgatggagaccgtgacaacagtgaccacaagggagcagatcctggtgaagcacgcccaggaagaactgccccctccaccccctcagaagaagagaactctggaaagactgcaggagctgcaggaggccactgacgagctggacctgaagctgcggcaggccgaggtgattaagggcagctggcagcctgtgggcgatctgctgatcgacagcctgcaggaccacctggagaaggtgaaagccctgcggggcgagatcgcccctctgaaggagaacgtcagccatgtgaatgacctggccagacagctgaccacactggggattcagctgtctccttacaatctgtcaaccctggaggacctgaacactcgctggaagctgctgcaggtggccgtggaggacagggtgcggcagctgcacgaagcccatcgcgactttgggcccgcctctcagcactttctgagcacctccgtgcagggaccctgggagcgggcaatcagcccaaacaaggtgccatactacatcaaccacgagacccagaccacctgttgggatcaccccaagatgacagagctgtaccagtctctggctgacctgaacaacgtgcggttctcagcctacaggaccgccatgaagctgcggagactgcagaaggccctgtgcctggatctgctgagcctctccgctgcttgtgacgccctggatcagcacaacctgaaacagaacgaccagccaatggacatcctgcagattattaattgcctgacaaccatctatgatcggctggaacaggagcacaataatctggtgaacgtgccactgtgcgtggacatgtgcctgaattggctgctgaacgtgtacgacacaggacggaccggcagaatcagagtgctgtcttttaagaccgggatcatcagcctgtgcaaagcccacctggaggacaagtaccggtatctgttcaaacaagtggcctccagcaccggcttttgcgaccagcgcaggctgggcctgctgctccacgactccatccagatccctagacagctgggcgaggtggcttcttttggcggatccaatatcgagcccagtgtgcggagctgttttcagtttgctaataataagcctgagatcgaggccgctctgttcctggactggatgagactggagccccagtccatggtgtggctgccagtgctgcacagggtcgccgccgcagagactgccaagcaccaggccaagtgcaacatctgcaaagaatgcccaatcattggctttagataccggagcctcaaacactttaactacgacatctgccagagctgcttcttctccggccgggtggccaagggccacaagatgcactaccccatggtggagtactgtaccccaaccacttccggcgaggacgtgagagatttcgccaaggtgctgaagaacaagttccggacaaagagatactttgcaaaacacccaagaatgggctacctgccagtgcagaccgtgctggagggggacaatatggagacagacacaatgtgatagattccaacaaaatcactgatgctggaagatcagcaacaaaatcactgatgctggaagacgcaggaataaaatatctttattttcattacatctgtgtgttggttttttgtgtgaggaacccctagtgatggagttggccactccctctctgcgcgctcgctcgctcactgaggccgggcgaccaaaggtcgcccgacgcccgggctttgcccgggcggcctcagtgagcgagcgagcgcgc

SEQ ID NO: 2432 - DNA, 4767 bp, synthetic construct
  source 1..4767: mol_type = other DNA
gcgcgctcgctcgctcactgaggccgcccgggcaaagcccgggcgtcgggcgacctttggtcgcccggcctcagtgagcgagcgagcgcgcagagagggagtggccaactccatcactaggggttcctcgtctgtctaattccagccaagggcatgggggaaaggacagagcccagggacctgtggcctattctctgagaggacgctgggctaataataggaggggagattagggagggatttgactgcattgttatctcacaggaatggcgtttgagagccttgcttccaagctcttccaagagtcatgccacccccctccaatctctgtggaagtgcccactgcctttcccgcttcgttctcttctctcggtcccatccctgacccactagcctggtgccggggggagaccaatttctggaggaagctctgggtacccagtcttgccctaagcctgcctctgaacaggctgttcttgtttatgacccccgtcccagcagaatagtgattgctcatccctgcatgtgatttgagagggccagtctttcaggcctggaggaaactcaagccccaccagccgcttggcatcggaatgctcagctggtcccctcctggggctcatgtgaccaagatctagctataaatatcagaggggcctcagaccaagacagaattcgggcaccaggagaaggaagccaacaggatccgacccggtgttttgtgacaaaggcaagacccccaggtctacttagagcaacgttagtagaggacagcccaggtacctgggcaggtaagtatcaaggttacaagacaggtttaaggagaccaatagaaactgggcttgtcgagacagagaagactcttgcgtttctgataggcacctattggtcttactgacatccactttgcctttctctccacaggtgtccagactagtgccaccatgctgtggtgggaggaggtggaggattgctacgagagagaggacgtgcagaagaaaaccttcaccaaatgggtgaacgcccagttcagcaagtttggcaagcagcacatcgagaacctgttcagcgatctgcaggacggccgcaggctgctggatctgctggagggtctgaccggccagaaactgcccaaagagaagggatcaaccagggtgcacgccctgaataatgtgaacaaggccctgagagtgctgcaaaataataatgtggatctggtgaacatcggatctaccgatattgtggacggcaaccataagctgactctgggcctgatctggaatatcatcctgcactggcaggtgaaaaatgtgatgaaaaacatcatggccgggctgcagcagaccaactctgagaagatcctgctgagctgggtgaggcagtctacaagaaattacccccaggtgaacgtgatcaatttcaccaccagctggtccgacgggctggctctgaatgccctgattcacagccaccggcccgacctgttcgactggaattccgtggtgtgccagcagagcgccacacagagactggagcacgctttcaatatcgctcggtatcagctgggcatcgagaagctgctggaccccgaggacgtggacactacttaccccgataaaaagagcatcctgatgtatatcacctccctgttccaagtgctgccccagcaggtctccatcgaggccatccaggaggtggaaatgctgccccggcccccaaaggtgacaaaggaagaacacttccagctccaccaccagatgcactactctcagcagatcaccgtgagcctggcccaggggtacgagcggacctcttctccaaagccccgcttcaagagctatgcctatacccaggccgcctatgtgaccacctccgatcccacccgctcacccttcccttctcaacacctggaagccccagaggacaagtccttcggcagttctctgatggagtctgaggtgaacctggatagatatcagactgccctggaggaggtgctgtcttggctgctctccgccgaggacaccctgcaggcacagggcgagatctccaacgatgtggaggtggtgaaggaccagttccacacacacgagggctatatgatggacctgactgcccatcagggcagagtgggcaatatcctgcagctgggttccaaactgataggcaccggaaagctgagcgaagacgaggagaccgaggtgcaggagcagatgaatctgctgaactcccggtgggagtgcctgcgagtcgccagcatggaaaagcagagcaacctgcaccgcgtgctcatggatctgcagaatcagaagctgaaggagctgaatgactggctgaccaagaccgaagagcgcaccaggaagatggaggaggagccactgggccccgatctggaggacctgaaaagacaggtgcagcagcataaagtgctgcaggaggacctggagcaggaacaagtgagagtgaattctctgacacacatggtggtggtggtggacgagagcagcggcgaccacgcaacagccgccctggaggagcagctgaaagtgctgggagaccggtgggccaacatttgccggtggaccgaggaccgctgggtgctgctgcaggacattctgctgaagtggcagcggctgaccgaagagcagtgcctgttctccgcctggctgagcgagaaggaggacgccgtgaataagatccacaccaccgggttcaaggaccagaatgagatgctgtccagcctgcagaagctggccgtgctgaaggccgatctggaaaagaagaagcagagcatgggaaagctgtatagcctgaagcaggacctgctgtctactctgaaaaacaagtcagtgacccagaagaccgaggcctggctggacaacttcgcccgctgctgggacaacctggtgcagaagctggaaaagagcaccgcccagatcagccaggcagtgactaccacacagccctccctgacacagactactgtgatggagaccgtgacaacagtgaccacaagggagcagatcctggtgaagcacgcccaggaagaactgccccctccaccccctcagaagaagagaactctggaaagactgcaggagctgcaggaggccactgacgagctggacctgaagctgcggcaggccgaggtgattaagggcagctggcagcctgtgggcgatctgctgatcgacagcctgcaggaccacctggagaaggtgaaagccctgcggggcgagatcgcccctctgaaggagaacgtcagccatgtgaatgacctggccagacagctgaccacactggggattcagctgtctccttacaatctgtcaaccctggaggacctgaacactcgctggaagctgctgcaggtggccgtggaggacagggtgcggcagctgcacgaagcccatcgcgactttgggcccgcctctcagcactttctgagcacctccgtgcagggaccctgggagcgggcaatcagcccaaacaaggtgccatactacatcaaccacgagacccagaccacctgttgggatcaccccaagatgacagagctgtaccagtctctggctgacctgaacaacgtgcggttctcagcctacaggaccgccatgaagctgcggagactgcagaaggccctgtgcctggatctgctgagcctctccgctgcttgtgacgccctggatcagcacaacctgaaacagaacgaccagccaatggacatcctgcagattattaattgcctgacaaccatctatgatcggctggaacaggagcacaataatctggtgaacgtgccactgtgcgtggacatgtgcctgaattggctgctgaacgtgtacgacacaggacggaccggcagaatcagagtgctgtcttttaagaccgggatcatcagcctgtgcaaagcccacctggaggacaagtaccggtatctgttcaaacaagtggcctccagcaccggcttttgcgaccagcgcaggctgggcctgctgctccacgactccatccagatccctagacagctgggcgaggtggcttcttttggcggatccaatatcgagcccagtgtgcggagctgttttcagtttgctaataataagcctgagatcgaggccgctctgttcctggactggatgagactggagccccagtccatggtgtggctgccagtgctgcacagggtcgccgccgcagagactgccaagcaccaggccaagtgcaacatctgcaaagaatgcccaatcattggctttagataccggagcctcaaacactttaactacgacatctgccagagctgcttcttctccggccgggtggccaagggccacaagatgcactaccccatggtggagtactgtaccccaaccacttccggcgaggacgtgagagatttcgccaaggtgctgaagaacaagttccggacaaagagatactttgcaaaacacccaagaatgggctacctgccagtgcagaccgtgctggagggggacaatatggagacagacacaatgtgatagattccaacaaaatcactgatgctggaagatcagcaacaaaatcactgatgctggaagacgcaggaataaaatatctttattttcattacatctgtgtgttggttttttgtgtgaggaacccctagtgatggagttggccactccctctctgcgcgctcgctcgctcactgaggccgggcgaccaaaggtcgcccgacgcccgggctttgcccgggcggcctcagtgagcgagcgagcgcgc

SEQ ID NO: 2433 - DNA, 4809 bp, synthetic construct
  source 1..4809: mol_type = other DNA
gcgcgctcgctcgctcactgaggccgcccgggcaaagcccgggcgtcgggcgacctttggtcgcccggcctcagtgagcgagcgagcgcgcagagagggagtggccaactccatcactaggggttccttagttattaatagtaatcaattacggggtcattagttcatagcccatatatggagttccgcgttacataacttacggtaaatggcccgcctggctgaccgcccaacgacccccgcccattgacgtcaataatgacgtatgttcccatagtaacgccaatagggactttccattgacgtcaatgggtggagtatttacggtaaactgcccacttggcagtacatcaagtgtatcatatgccaagtacgccccctattgacgtcaatgacggtaaatggcccgcctggcattatgcccagtacatgaccttatgggactttcctacttggcagtacatctacgtattagtcatcgctattaccatgctagactagcatgctgcccatgtaaggaggcaaggcctggggacacccgagatgcctggttataattaacccagacatgtggctgccccccccccccaacacctgctgcctctaaaaataaccctgcatgccatgttcccggcgaagggccagctgtcccccgccagctagactcagctctcaggggcccctccctggggacagcccctcctggctagtcacaccctgtaggctcctctatataacccaggggcacaggggctgccctcattctaccaccacctccacagcacagacagacactcaggagccagccagccagcccaggtacctgggcaggtaagtatcaaggttacaagacaggtttaaggagaccaatagaaactgggcttgtcgagacagagaagactcttgcgtttctgataggcacctattggtcttactgacatccactttgcctttctctccacaggtgtccagactagtgccaccatgctgtggtgggaggaggtggaggattgctacgagagagaggacgtgcagaagaaaaccttcaccaaatgggtgaacgcccagttcagcaagtttggcaagcagcacatcgagaacctgttcagcgatctgcaggacggccgcaggctgctggatctgctggagggtctgaccggccagaaactgcccaaagagaagggatcaaccagggtgcacgccctgaataatgtgaacaaggccctgagagtgctgcaaaataataatgtggatctggtgaacatcggatctaccgatattgtggacggcaaccataagctgactctgggcctgatctggaatatcatcctgcactggcaggtgaaaaatgtgatgaaaaacatcatggccgggctgcagcagaccaactctgagaagatcctgctgagctgggtgaggcagtctacaagaaattacccccaggtgaacgtgatcaatttcaccaccagctggtccgacgggctggctctgaatgccctgattcacagccaccggcccgacctgttcgactggaattccgtggtgtgccagcagagcgccacacagagactggagcacgctttcaatatcgctcggtatcagctgggcatcgagaagctgctggaccccgaggacgtggacactacttaccccgataaaaagagcatcctgatgtatatcacctccctgttccaagtgctgccccagcaggtctccatcgaggccatccaggaggtggaaatgctgccccggcccccaaaggtgacaaaggaagaacacttccagctccaccaccagatgcactactctcagcagatcaccgtgagcctggcccaggggtacgagcggacctcttctccaaagccccgcttcaagagctatgcctatacccaggccgcctatgtgaccacctccgatcccacccgctcacccttcccttctcaacacctggaagccccagaggacaagtccttcggcagttctctgatggagtctgaggtgaacctggatagatatcagactgccctggaggaggtgctgtcttggctgctctccgccgaggacaccctgcaggcacagggcgagatctccaacgatgtggaggtggtgaaggaccagttccacacacacgagggctatatgatggacctgactgcccatcagggcagagtgggcaatatcctgcagctgggttccaaactgataggcaccggaaagctgagcgaagacgaggagaccgaggtgcaggagcagatgaatctgctgaactcccggtgggagtgcctgcgagtcgccagcatggaaaagcagagcaacctgcaccgcgtgctcatggatctgcagaatcagaagctgaaggagctgaatgactggctgaccaagaccgaagagcgcaccaggaagatggaggaggagccactgggccccgatctggaggacctgaaaagacaggtgcagcagcataaagtgctgcaggaggacctggagcaggaacaagtgagagtgaattctctgacacacatggtggtggtggtggacgagagcagcggcgaccacgcaacagccgccctggaggagcagctgaaagtgctgggagaccggtgggccaacatttgccggtggaccgaggaccgctgggtgctgctgcaggacattctgctgaagtggcagcggctgaccgaagagcagtgcctgttctccgcctggctgagcgagaaggaggacgccgtgaataagatccacaccaccgggttcaaggaccagaatgagatgctgtccagcctgcagaagctggccgtgctgaaggccgatctggaaaagaagaagcagagcatgggaaagctgtatagcctgaagcaggacctgctgtctactctgaaaaacaagtcagtgacccagaagaccgaggcctggctggacaacttcgcccgctgctgggacaacctggtgcagaagctggaaaagagcaccgcccagatcagccaggcagtgactaccacacagccctccctgacacagactactgtgatggagaccgtgacaacagtgaccacaagggagcagatcctggtgaagcacgcccaggaagaactgccccctccaccccctcagaagaagagaactctggaaagactgcaggagctgcaggaggccactgacgagctggacctgaagctgcggcaggccgaggtgattaagggcagctggcagcctgtgggcgatctgctgatcgacagcctgcaggaccacctggagaaggtgaaagccctgcggggcgagatcgcccctctgaaggagaacgtcagccatgtgaatgacctggccagacagctgaccacactggggattcagctgtctccttacaatctgtcaaccctggaggacctgaacactcgctggaagctgctgcaggtggccgtggaggacagggtgcggcagctgcacgaagcccatcgcgactttgggcccgcctctcagcactttctgagcacctccgtgcagggaccctgggagcgggcaatcagcccaaacaaggtgccatactacatcaaccacgagacccagaccacctgttgggatcaccccaagatgacagagctgtaccagtctctggctgacctgaacaacgtgcggttctcagcctacaggaccgccatgaagctgcggagactgcagaaggccctgtgcctggatctgctgagcctctccgctgcttgtgacgccctggatcagcacaacctgaaacagaacgaccagccaatggacatcctgcagattattaattgcctgacaaccatctatgatcggctggaacaggagcacaataatctggtgaacgtgccactgtgcgtggacatgtgcctgaattggctgctgaacgtgtacgacacaggacggaccggcagaatcagagtgctgtcttttaagaccgggatcatcagcctgtgcaaagcccacctggaggacaagtaccggtatctgttcaaacaagtggcctccagcaccggcttttgcgaccagcgcaggctgggcctgctgctccacgactccatccagatccctagacagctgggcgaggtggcttcttttggcggatccaatatcgagcccagtgtgcggagctgttttcagtttgctaataataagcctgagatcgaggccgctctgttcctggactggatgagactggagccccagtccatggtgtggctgccagtgctgcacagggtcgccgccgcagagactgccaagcaccaggccaagtgcaacatctgcaaagaatgcccaatcattggctttagataccggagcctcaaacactttaactacgacatctgccagagctgcttcttctccggccgggtggccaagggccacaagatgcactaccccatggtggagtactgtaccccaaccacttccggcgaggacgtgagagatttcgccaaggtgctgaagaacaagttccggacaaagagatactttgcaaaacacccaagaatgggctacctgccagtgcagaccgtgctggagggggacaatatggagacagacacaatgtgatagattccggcctgattcacaacaccagctagatcagcggcctgattcacaacaccagctagacgcaggaataaaatatctttattttcattacatctgtgtgttggttttttgtgtgaggaacccctagtgatggagttggccactccctctctgcgcgctcgctcgctcactgaggccgggcgaccaaaggtcgcccgacgcccgggctttgcccgggcggcctcagtgagcgagcgagcgcgc

SEQ ID NO: 2434 - DNA, 4769 bp, synthetic construct
  source 1..4769: mol_type = other DNA
gcgcgctcgctcgctcactgaggccgcccgggcaaagcccgggcgtcgggcgacctttggtcgcccggcctcagtgagcgagcgagcgcgcagagagggagtggccaactccatcactaggggttcctcgtctgtctaattccagccaagggcatgggggaaaggacagagcccagggacctgtggcctattctctgagaggacgctgggctaataataggaggggagattagggagggatttgactgcattgttatctcacaggaatggcgtttgagagccttgcttccaagctcttccaagagtcatgccacccccctccaatctctgtggaagtgcccactgcctttcccgcttcgttctcttctctctaaatctgagcccaccccactcaggggtacaggatctggttcatttatctcccagaatgatgccttgggttgcgtcccctctaaactctggcacattccagcccctctttgggagaaagaacatctcttcttgcccaggccctagtgagacatgcatcgcaagacatgctccccccttcctccccgctgggctccagctgctgccagccctccaagaaaggagaggccctgagttgggctattttggtatctggggtgggcacccgcagggctaaggttaccttggtatgttaagggctccctggggcaggactatataaccccagagggactgccccatgctgactccttgcttctttcctgctcgagccgctgccttgccccccggagactgaagacacagcccaggtacctgggcaggtaagtatcaaggttacaagacaggtttaaggagaccaatagaaactgggcttgtcgagacagagaagactcttgcgtttctgataggcacctattggtcttactgacatccactttgcctttctctccacaggtgtccagactagtgccaccatgctgtggtgggaggaggtggaggattgctacgagagagaggacgtgcagaagaaaaccttcaccaaatgggtgaacgcccagttcagcaagtttggcaagcagcacatcgagaacctgttcagcgatctgcaggacggccgcaggctgctggatctgctggagggtctgaccggccagaaactgcccaaagagaagggatcaaccagggtgcacgccctgaataatgtgaacaaggccctgagagtgctgcaaaataataatgtggatctggtgaacatcggatctaccgatattgtggacggcaaccataagctgactctgggcctgatctggaatatcatcctgcactggcaggtgaaaaatgtgatgaaaaacatcatggccgggctgcagcagaccaactctgagaagatcctgctgagctgggtgaggcagtctacaagaaattacccccaggtgaacgtgatcaatttcaccaccagctggtccgacgggctggctctgaatgccctgattcacagccaccggcccgacctgttcgactggaattccgtggtgtgccagcagagcgccacacagagactggagcacgctttcaatatcgctcggtatcagctgggcatcgagaagctgctggaccccgaggacgtggacactacttaccccgataaaaagagcatcctgatgtatatcacctccctgttccaagtgctgccccagcaggtctccatcgaggccatccaggaggtggaaatgctgccccggcccccaaaggtgacaaaggaagaacacttccagctccaccaccagatgcactactctcagcagatcaccgtgagcctggcccaggggtacgagcggacctcttctccaaagccccgcttcaagagctatgcctatacccaggccgcctatgtgaccacctccgatcccacccgctcacccttcccttctcaacacctggaagccccagaggacaagtccttcggcagttctctgatggagtctgaggtgaacctggatagatatcagactgccctggaggaggtgctgtcttggctgctctccgccgaggacaccctgcaggcacagggcgagatctccaacgatgtggaggtggtgaaggaccagttccacacacacgagggctatatgatggacctgactgcccatcagggcagagtgggcaatatcctgcagctgggttccaaactgataggcaccggaaagctgagcgaagacgaggagaccgaggtgcaggagcagatgaatctgctgaactcccggtgggagtgcctgcgagtcgccagcatggaaaagcagagcaacctgcaccgcgtgctcatggatctgcagaatcagaagctgaaggagctgaatgactggctgaccaagaccgaagagcgcaccaggaagatggaggaggagccactgggccccgatctggaggacctgaaaagacaggtgcagcagcataaagtgctgcaggaggacctggagcaggaacaagtgagagtgaattctctgacacacatggtggtggtggtggacgagagcagcggcgaccacgcaacagccgccctggaggagcagctgaaagtgctgggagaccggtgggccaacatttgccggtggaccgaggaccgctgggtgctgctgcaggacattctgctgaagtggcagcggctgaccgaagagcagtgcctgttctccgcctggctgagcgagaaggaggacgccgtgaataagatccacaccaccgggttcaaggaccagaatgagatgctgtccagcctgcagaagctggccgtgctgaaggccgatctggaaaagaagaagcagagcatgggaaagctgtatagcctgaagcaggacctgctgtctactctgaaaaacaagtcagtgacccagaagaccgaggcctggctggacaacttcgcccgctgctgggacaacctggtgcagaagctggaaaagagcaccgcccagatcagccaggcagtgactaccacacagccctccctgacacagactactgtgatggagaccgtgacaacagtgaccacaagggagcagatcctggtgaagcacgcccaggaagaactgccccctccaccccctcagaagaagagaactctggaaagactgcaggagctgcaggaggccactgacgagctggacctgaagctgcggcaggccgaggtgattaagggcagctggcagcctgtgggcgatctgctgatcgacagcctgcaggaccacctggagaaggtgaaagccctgcggggcgagatcgcccctctgaaggagaacgtcagccatgtgaatgacctggccagacagctgaccacactggggattcagctgtctccttacaatctgtcaaccctggaggacctgaacactcgctggaagctgctgcaggtggccgtggaggacagggtgcggcagctgcacgaagcccatcgcgactttgggcccgcctctcagcactttctgagcacctccgtgcagggaccctgggagcgggcaatcagcccaaacaaggtgccatactacatcaaccacgagacccagaccacctgttgggatcaccccaagatgacagagctgtaccagtctctggctgacctgaacaacgtgcggttctcagcctacaggaccgccatgaagctgcggagactgcagaaggccctgtgcctggatctgctgagcctctccgctgcttgtgacgccctggatcagcacaacctgaaacagaacgaccagccaatggacatcctgcagattattaattgcctgacaaccatctatgatcggctggaacaggagcacaataatctggtgaacgtgccactgtgcgtggacatgtgcctgaattggctgctgaacgtgtacgacacaggacggaccggcagaatcagagtgctgtcttttaagaccgggatcatcagcctgtgcaaagcccacctggaggacaagtaccggtatctgttcaaacaagtggcctccagcaccggcttttgcgaccagcgcaggctgggcctgctgctccacgactccatccagatccctagacagctgggcgaggtggcttcttttggcggatccaatatcgagcccagtgtgcggagctgttttcagtttgctaataataagcctgagatcgaggccgctctgttcctggactggatgagactggagccccagtccatggtgtggctgccagtgctgcacagggtcgccgccgcagagactgccaagcaccaggccaagtgcaacatctgcaaagaatgcccaatcattggctttagataccggagcctcaaacactttaactacgacatctgccagagctgcttcttctccggccgggtggccaagggccacaagatgcactaccccatggtggagtactgtaccccaaccacttccggcgaggacgtgagagatttcgccaaggtgctgaagaacaagttccggacaaagagatactttgcaaaacacccaagaatgggctacctgccagtgcagaccgtgctggagggggacaatatggagacagacacaatgtgatagattccggcctgattcacaacaccagctagatcagcggcctgattcacaacaccagctagacgcaggaataaaatatctttattttcattacatctgtgtgttggttttttgtgtgaggaacccctagtgatggagttggccactccctctctgcgcgctcgctcgctcactgaggccgggcgaccaaaggtcgcccgacgcccgggctttgcccgggcggcctcagtgagcgagcgagcgcgc

SEQ ID NO: 2435 - DNA, 4769 bp, synthetic construct
  source 1..4769: mol_type = other DNA
gcgcgctcgctcgctcactgaggccgcccgggcaaagcccgggcgtcgggcgacctttggtcgcccggcctcagtgagcgagcgagcgcgcagagagggagtggccaactccatcactaggggttcctcgtctgtctaattccagccaagggcatgggggaaaggacagagcccagggacctgtggcctattctctgagaggacgctgggctaataataggaggggagattagggagggatttgactgcattgttatctcacaggaatggcgtttgagagccttgcttccaagctcttccaagagtcatgccacccccctccaatctctgtggaagtgcccactgcctttcccgcttcgttctcttctctcggtcccatccctgacccactagcctggtgccggggggagaccaatttctggaggaagctctgggtacccagtcttgccctaagcctgcctctgaacaggctgttcttgtttatgacccccgtcccagcagaatagtgattgctcatccctgcatgtgatttgagagggccagtctttcaggcctggaggaaactcaagccccaccagccgcttggcatcggaatgctcagctggtcccctcctggggctcatgtgaccaagatctagctataaatatcagaggggcctcagaccaagacagaattcgggcaccaggagaaggaagccaacaggatccgacccggtgttttgtgacaaaggcaagacccccaggtctacttagagcaacgttagtagaggacagcccaggtacctgggcaggtaagtatcaaggttacaagacaggtttaaggagaccaatagaaactgggcttgtcgagacagagaagactcttgcgtttctgataggcacctattggtcttactgacatccactttgcctttctctccacaggtgtccagactagtgccaccatgctgtggtgggaggaggtggaggattgctacgagagagaggacgtgcagaagaaaaccttcaccaaatgggtgaacgcccagttcagcaagtttggcaagcagcacatcgagaacctgttcagcgatctgcaggacggccgcaggctgctggatctgctggagggtctgaccggccagaaactgcccaaagagaagggatcaaccagggtgcacgccctgaataatgtgaacaaggccctgagagtgctgcaaaataataatgtggatctggtgaacatcggatctaccgatattgtggacggcaaccataagctgactctgggcctgatctggaatatcatcctgcactggcaggtgaaaaatgtgatgaaaaacatcatggccgggctgcagcagaccaactctgagaagatcctgctgagctgggtgaggcagtctacaagaaattacccccaggtgaacgtgatcaatttcaccaccagctggtccgacgggctggctctgaatgccctgattcacagccaccggcccgacctgttcgactggaattccgtggtgtgccagcagagcgccacacagagactggagcacgctttcaatatcgctcggtatcagctgggcatcgagaagctgctggaccccgaggacgtggacactacttaccccgataaaaagagcatcctgatgtatatcacctccctgttccaagtgctgccccagcaggtctccatcgaggccatccaggaggtggaaatgctgccccggcccccaaaggtgacaaaggaagaacacttccagctccaccaccagatgcactactctcagcagatcaccgtgagcctggcccaggggtacgagcggacctcttctccaaagccccgcttcaagagctatgcctatacccaggccgcctatgtgaccacctccgatcccacccgctcacccttcccttctcaacacctggaagccccagaggacaagtccttcggcagttctctgatggagtctgaggtgaacctggatagatatcagactgccctggaggaggtgctgtcttggctgctctccgccgaggacaccctgcaggcacagggcgagatctccaacgatgtggaggtggtgaaggaccagttccacacacacgagggctatatgatggacctgactgcccatcagggcagagtgggcaatatcctgcagctgggttccaaactgataggcaccggaaagctgagcgaagacgaggagaccgaggtgcaggagcagatgaatctgctgaactcccggtgggagtgcctgcgagtcgccagcatggaaaagcagagcaacctgcaccgcgtgctcatggatctgcagaatcagaagctgaaggagctgaatgactggctgaccaagaccgaagagcgcaccaggaagatggaggaggagccactgggccccgatctggaggacctgaaaagacaggtgcagcagcataaagtgctgcaggaggacctggagcaggaacaagtgagagtgaattctctgacacacatggtggtggtggtggacgagagcagcggcgaccacgcaacagccgccctggaggagcagctgaaagtgctgggagaccggtgggccaacatttgccggtggaccgaggaccgctgggtgctgctgcaggacattctgctgaagtggcagcggctgaccgaagagcagtgcctgttctccgcctggctgagcgagaaggaggacgccgtgaataagatccacaccaccgggttcaaggaccagaatgagatgctgtccagcctgcagaagctggccgtgctgaaggccgatctggaaaagaagaagcagagcatgggaaagctgtatagcctgaagcaggacctgctgtctactctgaaaaacaagtcagtgacccagaagaccgaggcctggctggacaacttcgcccgctgctgggacaacctggtgcagaagctggaaaagagcaccgcccagatcagccaggcagtgactaccacacagccctccctgacacagactactgtgatggagaccgtgacaacagtgaccacaagggagcagatcctggtgaagcacgcccaggaagaactgccccctccaccccctcagaagaagagaactctggaaagactgcaggagctgcaggaggccactgacgagctggacctgaagctgcggcaggccgaggtgattaagggcagctggcagcctgtgggcgatctgctgatcgacagcctgcaggaccacctggagaaggtgaaagccctgcggggcgagatcgcccctctgaaggagaacgtcagccatgtgaatgacctggccagacagctgaccacactggggattcagctgtctccttacaatctgtcaaccctggaggacctgaacactcgctggaagctgctgcaggtggccgtggaggacagggtgcggcagctgcacgaagcccatcgcgactttgggcccgcctctcagcactttctgagcacctccgtgcagggaccctgggagcgggcaatcagcccaaacaaggtgccatactacatcaaccacgagacccagaccacctgttgggatcaccccaagatgacagagctgtaccagtctctggctgacctgaacaacgtgcggttctcagcctacaggaccgccatgaagctgcggagactgcagaaggccctgtgcctggatctgctgagcctctccgctgcttgtgacgccctggatcagcacaacctgaaacagaacgaccagccaatggacatcctgcagattattaattgcctgacaaccatctatgatcggctggaacaggagcacaataatctggtgaacgtgccactgtgcgtggacatgtgcctgaattggctgctgaacgtgtacgacacaggacggaccggcagaatcagagtgctgtcttttaagaccgggatcatcagcctgtgcaaagcccacctggaggacaagtaccggtatctgttcaaacaagtggcctccagcaccggcttttgcgaccagcgcaggctgggcctgctgctccacgactccatccagatccctagacagctgggcgaggtggcttcttttggcggatccaatatcgagcccagtgtgcggagctgttttcagtttgctaataataagcctgagatcgaggccgctctgttcctggactggatgagactggagccccagtccatggtgtggctgccagtgctgcacagggtcgccgccgcagagactgccaagcaccaggccaagtgcaacatctgcaaagaatgcccaatcattggctttagataccggagcctcaaacactttaactacgacatctgccagagctgcttcttctccggccgggtggccaagggccacaagatgcactaccccatggtggagtactgtaccccaaccacttccggcgaggacgtgagagatttcgccaaggtgctgaagaacaagttccggacaaagagatactttgcaaaacacccaagaatgggctacctgccagtgcagaccgtgctggagggggacaatatggagacagacacaatgtgatagattccggcctgattcacaacaccagctagatcagcggcctgattcacaacaccagctagacgcaggaataaaatatctttattttcattacatctgtgtgttggttttttgtgtgaggaacccctagtgatggagttggccactccctctctgcgcgctcgctcgctcactgaggccgggcgaccaaaggtcgcccgacgcccgggctttgcccgggcggcctcagtgagcgagcgagcgcgc

SEQ ID NO: 2436 - DNA, 4809 bp, synthetic construct
  source 1..4809: mol_type = other DNA
gcgcgctcgctcgctcactgaggccgcccgggcaaagcccgggcgtcgggcgacctttggtcgcccggcctcagtgagcgagcgagcgcgcagagagggagtggccaactccatcactaggggttccttagttattaatagtaatcaattacggggtcattagttcatagcccatatatggagttccgcgttacataacttacggtaaatggcccgcctggctgaccgcccaacgacccccgcccattgacgtcaataatgacgtatgttcccatagtaacgccaatagggactttccattgacgtcaatgggtggagtatttacggtaaactgcccacttggcagtacatcaagtgtatcatatgccaagtacgccccctattgacgtcaatgacggtaaatggcccgcctggcattatgcccagtacatgaccttatgggactttcctacttggcagtacatctacgtattagtcatcgctattaccatgctagactagcatgctgcccatgtaaggaggcaaggcctggggacacccgagatgcctggttataattaacccagacatgtggctgccccccccccccaacacctgctgcctctaaaaataaccctgcatgccatgttcccggcgaagggccagctgtcccccgccagctagactcagctctcaggggcccctccctggggacagcccctcctggctagtcacaccctgtaggctcctctatataacccaggggcacaggggctgccctcattctaccaccacctccacagcacagacagacactcaggagccagccagccagcccaggtacctgggcaggtaagtatcaaggttacaagacaggtttaaggagaccaatagaaactgggcttgtcgagacagagaagactcttgcgtttctgataggcacctattggtcttactgacatccactttgcctttctctccacaggtgtccagactagtgccaccatgctgtggtgggaggaggtggaggattgctacgagagagaggacgtgcagaagaaaaccttcaccaaatgggtgaacgcccagttcagcaagtttggcaagcagcacatcgagaacctgttcagcgatctgcaggacggccgcaggctgctggatctgctggagggtctgaccggccagaaactgcccaaagagaagggatcaaccagggtgcacgccctgaataatgtgaacaaggccctgagagtgctgcaaaataataatgtggatctggtgaacatcggatctaccgatattgtggacggcaaccataagctgactctgggcctgatctggaatatcatcctgcactggcaggtgaaaaatgtgatgaaaaacatcatggccgggctgcagcagaccaactctgagaagatcctgctgagctgggtgaggcagtctacaagaaattacccccaggtgaacgtgatcaatttcaccaccagctggtccgacgggctggctctgaatgccctgattcacagccaccggcccgacctgttcgactggaattccgtggtgtgccagcagagcgccacacagagactggagcacgctttcaatatcgctcggtatcagctgggcatcgagaagctgctggaccccgaggacgtggacactacttaccccgataaaaagagcatcctgatgtatatcacctccctgttccaagtgctgccccagcaggtctccatcgaggccatccaggaggtggaaatgctgccccggcccccaaaggtgacaaaggaagaacacttccagctccaccaccagatgcactactctcagcagatcaccgtgagcctggcccaggggtacgagcggacctcttctccaaagccccgcttcaagagctatgcctatacccaggccgcctatgtgaccacctccgatcccacccgctcacccttcccttctcaacacctggaagccccagaggacaagtccttcggcagttctctgatggagtctgaggtgaacctggatagatatcagactgccctggaggaggtgctgtcttggctgctctccgccgaggacaccctgcaggcacagggcgagatctccaacgatgtggaggtggtgaaggaccagttccacacacacgagggctatatgatggacctgactgcccatcagggcagagtgggcaatatcctgcagctgggttccaaactgataggcaccggaaagctgagcgaagacgaggagaccgaggtgcaggagcagatgaatctgctgaactcccggtgggagtgcctgcgagtcgccagcatggaaaagcagagcaacctgcaccgcgtgctcatggatctgcagaatcagaagctgaaggagctgaatgactggctgaccaagaccgaagagcgcaccaggaagatggaggaggagccactgggccccgatctggaggacctgaaaagacaggtgcagcagcataaagtgctgcaggaggacctggagcaggaacaagtgagagtgaattctctgacacacatggtggtggtggtggacgagagcagcggcgaccacgcaacagccgccctggaggagcagctgaaagtgctgggagaccggtgggccaacatttgccggtggaccgaggaccgctgggtgctgctgcaggacattctgctgaagtggcagcggctgaccgaagagcagtgcctgttctccgcctggctgagcgagaaggaggacgccgtgaataagatccacaccaccgggttcaaggaccagaatgagatgctgtccagcctgcagaagctggccgtgctgaaggccgatctggaaaagaagaagcagagcatgggaaagctgtatagcctgaagcaggacctgctgtctactctgaaaaacaagtcagtgacccagaagaccgaggcctggctggacaacttcgcccgctgctgggacaacctggtgcagaagctggaaaagagcaccgcccagatcagccaggcagtgactaccacacagccctccctgacacagactactgtgatggagaccgtgacaacagtgaccacaagggagcagatcctggtgaagcacgcccaggaagaactgccccctccaccccctcagaagaagagaactctggaaagactgcaggagctgcaggaggccactgacgagctggacctgaagctgcggcaggccgaggtgattaagggcagctggcagcctgtgggcgatctgctgatcgacagcctgcaggaccacctggagaaggtgaaagccctgcggggcgagatcgcccctctgaaggagaacgtcagccatgtgaatgacctggccagacagctgaccacactggggattcagctgtctccttacaatctgtcaaccctggaggacctgaacactcgctggaagctgctgcaggtggccgtggaggacagggtgcggcagctgcacgaagcccatcgcgactttgggcccgcctctcagcactttctgagcacctccgtgcagggaccctgggagcgggcaatcagcccaaacaaggtgccatactacatcaaccacgagacccagaccacctgttgggatcaccccaagatgacagagctgtaccagtctctggctgacctgaacaacgtgcggttctcagcctacaggaccgccatgaagctgcggagactgcagaaggccctgtgcctggatctgctgagcctctccgctgcttgtgacgccctggatcagcacaacctgaaacagaacgaccagccaatggacatcctgcagattattaattgcctgacaaccatctatgatcggctggaacaggagcacaataatctggtgaacgtgccactgtgcgtggacatgtgcctgaattggctgctgaacgtgtacgacacaggacggaccggcagaatcagagtgctgtcttttaagaccgggatcatcagcctgtgcaaagcccacctggaggacaagtaccggtatctgttcaaacaagtggcctccagcaccggcttttgcgaccagcgcaggctgggcctgctgctccacgactccatccagatccctagacagctgggcgaggtggcttcttttggcggatccaatatcgagcccagtgtgcggagctgttttcagtttgctaataataagcctgagatcgaggccgctctgttcctggactggatgagactggagccccagtccatggtgtggctgccagtgctgcacagggtcgccgccgcagagactgccaagcaccaggccaagtgcaacatctgcaaagaatgcccaatcattggctttagataccggagcctcaaacactttaactacgacatctgccagagctgcttcttctccggccgggtggccaagggccacaagatgcactaccccatggtggagtactgtaccccaaccacttccggcgaggacgtgagagatttcgccaaggtgctgaagaacaagttccggacaaagagatactttgcaaaacacccaagaatgggctacctgccagtgcagaccgtgctggagggggacaatatggagacagacacaatgtgatagattctcatacagctagataaccaaagaagatcagtcatacagctagataaccaaagaagacgcaggaataaaatatctttattttcattacatctgtgtgttggttttttgtgtgaggaacccctagtgatggagttggccactccctctctgcgcgctcgctcgctcactgaggccgggcgaccaaaggtcgcccgacgcccgggctttgcccgggcggcctcagtgagcgagcgagcgcgc

SEQ ID NO: 2437 - DNA, 4769 bp, synthetic construct
  source 1..4769: mol_type = other DNA
gcgcgctcgctcgctcactgaggccgcccgggcaaagcccgggcgtcgggcgacctttggtcgcccggcctcagtgagcgagcgagcgcgcagagagggagtggccaactccatcactaggggttcctcgtctgtctaattccagccaagggcatgggggaaaggacagagcccagggacctgtggcctattctctgagaggacgctgggctaataataggaggggagattagggagggatttgactgcattgttatctcacaggaatggcgtttgagagccttgcttccaagctcttccaagagtcatgccacccccctccaatctctgtggaagtgcccactgcctttcccgcttcgttctcttctctctaaatctgagcccaccccactcaggggtacaggatctggttcatttatctcccagaatgatgccttgggttgcgtcccctctaaactctggcacattccagcccctctttgggagaaagaacatctcttcttgcccaggccctagtgagacatgcatcgcaagacatgctccccccttcctccccgctgggctccagctgctgccagccctccaagaaaggagaggccctgagttgggctattttggtatctggggtgggcacccgcagggctaaggttaccttggtatgttaagggctccctggggcaggactatataaccccagagggactgccccatgctgactccttgcttctttcctgctcgagccgctgccttgccccccggagactgaagacacagcccaggtacctgggcaggtaagtatcaaggttacaagacaggtttaaggagaccaatagaaactgggcttgtcgagacagagaagactcttgcgtttctgataggcacctattggtcttactgacatccactttgcctttctctccacaggtgtccagactagtgccaccatgctgtggtgggaggaggtggaggattgctacgagagagaggacgtgcagaagaaaaccttcaccaaatgggtgaacgcccagttcagcaagtttggcaagcagcacatcgagaacctgttcagcgatctgcaggacggccgcaggctgctggatctgctggagggtctgaccggccagaaactgcccaaagagaagggatcaaccagggtgcacgccctgaataatgtgaacaaggccctgagagtgctgcaaaataataatgtggatctggtgaacatcggatctaccgatattgtggacggcaaccataagctgactctgggcctgatctggaatatcatcctgcactggcaggtgaaaaatgtgatgaaaaacatcatggccgggctgcagcagaccaactctgagaagatcctgctgagctgggtgaggcagtctacaagaaattacccccaggtgaacgtgatcaatttcaccaccagctggtccgacgggctggctctgaatgccctgattcacagccaccggcccgacctgttcgactggaattccgtggtgtgccagcagagcgccacacagagactggagcacgctttcaatatcgctcggtatcagctgggcatcgagaagctgctggaccccgaggacgtggacactacttaccccgataaaaagagcatcctgatgtatatcacctccctgttccaagtgctgccccagcaggtctccatcgaggccatccaggaggtggaaatgctgccccggcccccaaaggtgacaaaggaagaacacttccagctccaccaccagatgcactactctcagcagatcaccgtgagcctggcccaggggtacgagcggacctcttctccaaagccccgcttcaagagctatgcctatacccaggccgcctatgtgaccacctccgatcccacccgctcacccttcccttctcaacacctggaagccccagaggacaagtccttcggcagttctctgatggagtctgaggtgaacctggatagatatcagactgccctggaggaggtgctgtcttggctgctctccgccgaggacaccctgcaggcacagggcgagatctccaacgatgtggaggtggtgaaggaccagttccacacacacgagggctatatgatggacctgactgcccatcagggcagagtgggcaatatcctgcagctgggttccaaactgataggcaccggaaagctgagcgaagacgaggagaccgaggtgcaggagcagatgaatctgctgaactcccggtgggagtgcctgcgagtcgccagcatggaaaagcagagcaacctgcaccgcgtgctcatggatctgcagaatcagaagctgaaggagctgaatgactggctgaccaagaccgaagagcgcaccaggaagatggaggaggagccactgggccccgatctggaggacctgaaaagacaggtgcagcagcataaagtgctgcaggaggacctggagcaggaacaagtgagagtgaattctctgacacacatggtggtggtggtggacgagagcagcggcgaccacgcaacagccgccctggaggagcagctgaaagtgctgggagaccggtgggccaacatttgccggtggaccgaggaccgctgggtgctgctgcaggacattctgctgaagtggcagcggctgaccgaagagcagtgcctgttctccgcctggctgagcgagaaggaggacgccgtgaataagatccacaccaccgggttcaaggaccagaatgagatgctgtccagcctgcagaagctggccgtgctgaaggccgatctggaaaagaagaagcagagcatgggaaagctgtatagcctgaagcaggacctgctgtctactctgaaaaacaagtcagtgacccagaagaccgaggcctggctggacaacttcgcccgctgctgggacaacctggtgcagaagctggaaaagagcaccgcccagatcagccaggcagtgactaccacacagccctccctgacacagactactgtgatggagaccgtgacaacagtgaccacaagggagcagatcctggtgaagcacgcccaggaagaactgccccctccaccccctcagaagaagagaactctggaaagactgcaggagctgcaggaggccactgacgagctggacctgaagctgcggcaggccgaggtgattaagggcagctggcagcctgtgggcgatctgctgatcgacagcctgcaggaccacctggagaaggtgaaagccctgcggggcgagatcgcccctctgaaggagaacgtcagccatgtgaatgacctggccagacagctgaccacactggggattcagctgtctccttacaatctgtcaaccctggaggacctgaacactcgctggaagctgctgcaggtggccgtggaggacagggtgcggcagctgcacgaagcccatcgcgactttgggcccgcctctcagcactttctgagcacctccgtgcagggaccctgggagcgggcaatcagcccaaacaaggtgccatactacatcaaccacgagacccagaccacctgttgggatcaccccaagatgacagagctgtaccagtctctggctgacctgaacaacgtgcggttctcagcctacaggaccgccatgaagctgcggagactgcagaaggccctgtgcctggatctgctgagcctctccgctgcttgtgacgccctggatcagcacaacctgaaacagaacgaccagccaatggacatcctgcagattattaattgcctgacaaccatctatgatcggctggaacaggagcacaataatctggtgaacgtgccactgtgcgtggacatgtgcctgaattggctgctgaacgtgtacgacacaggacggaccggcagaatcagagtgctgtcttttaagaccgggatcatcagcctgtgcaaagcccacctggaggacaagtaccggtatctgttcaaacaagtggcctccagcaccggcttttgcgaccagcgcaggctgggcctgctgctccacgactccatccagatccctagacagctgggcgaggtggcttcttttggcggatccaatatcgagcccagtgtgcggagctgttttcagtttgctaataataagcctgagatcgaggccgctctgttcctggactggatgagactggagccccagtccatggtgtggctgccagtgctgcacagggtcgccgccgcagagactgccaagcaccaggccaagtgcaacatctgcaaagaatgcccaatcattggctttagataccggagcctcaaacactttaactacgacatctgccagagctgcttcttctccggccgggtggccaagggccacaagatgcactaccccatggtggagtactgtaccccaaccacttccggcgaggacgtgagagatttcgccaaggtgctgaagaacaagttccggacaaagagatactttgcaaaacacccaagaatgggctacctgccagtgcagaccgtgctggagggggacaatatggagacagacacaatgtgatagattctcatacagctagataaccaaagaagatcagtcatacagctagataaccaaagaagacgcaggaataaaatatctttattttcattacatctgtgtgttggttttttgtgtgaggaacccctagtgatggagttggccactccctctctgcgcgctcgctcgctcactgaggccgggcgaccaaaggtcgcccgacgcccgggctttgcccgggcggcctcagtgagcgagcgagcgcgc

SEQ ID NO: 2438 - DNA, 4769 bp, synthetic construct
  source 1..4769: mol_type = other DNA
gcgcgctcgctcgctcactgaggccgcccgggcaaagcccgggcgtcgggcgacctttggtcgcccggcctcagtgagcgagcgagcgcgcagagagggagtggccaactccatcactaggggttcctcgtctgtctaattccagccaagggcatgggggaaaggacagagcccagggacctgtggcctattctctgagaggacgctgggctaataataggaggggagattagggagggatttgactgcattgttatctcacaggaatggcgtttgagagccttgcttccaagctcttccaagagtcatgccacccccctccaatctctgtggaagtgcccactgcctttcccgcttcgttctcttctctcggtcccatccctgacccactagcctggtgccggggggagaccaatttctggaggaagctctgggtacccagtcttgccctaagcctgcctctgaacaggctgttcttgtttatgacccccgtcccagcagaatagtgattgctcatccctgcatgtgatttgagagggccagtctttcaggcctggaggaaactcaagccccaccagccgcttggcatcggaatgctcagctggtcccctcctggggctcatgtgaccaagatctagctataaatatcagaggggcctcagaccaagacagaattcgggcaccaggagaaggaagccaacaggatccgacccggtgttttgtgacaaaggcaagacccccaggtctacttagagcaacgttagtagaggacagcccaggtacctgggcaggtaagtatcaaggttacaagacaggtttaaggagaccaatagaaactgggcttgtcgagacagagaagactcttgcgtttctgataggcacctattggtcttactgacatccactttgcctttctctccacaggtgtccagactagtgccaccatgctgtggtgggaggaggtggaggattgctacgagagagaggacgtgcagaagaaaaccttcaccaaatgggtgaacgcccagttcagcaagtttggcaagcagcacatcgagaacctgttcagcgatctgcaggacggccgcaggctgctggatctgctggagggtctgaccggccagaaactgcccaaagagaagggatcaaccagggtgcacgccctgaataatgtgaacaaggccctgagagtgctgcaaaataataatgtggatctggtgaacatcggatctaccgatattgtggacggcaaccataagctgactctgggcctgatctggaatatcatcctgcactggcaggtgaaaaatgtgatgaaaaacatcatggccgggctgcagcagaccaactctgagaagatcctgctgagctgggtgaggcagtctacaagaaattacccccaggtgaacgtgatcaatttcaccaccagctggtccgacgggctggctctgaatgccctgattcacagccaccggcccgacctgttcgactggaattccgtggtgtgccagcagagcgccacacagagactggagcacgctttcaatatcgctcggtatcagctgggcatcgagaagctgctggaccccgaggacgtggacactacttaccccgataaaaagagcatcctgatgtatatcacctccctgttccaagtgctgccccagcaggtctccatcgaggccatccaggaggtggaaatgctgccccggcccccaaaggtgacaaaggaagaacacttccagctccaccaccagatgcactactctcagcagatcaccgtgagcctggcccaggggtacgagcggacctcttctccaaagccccgcttcaagagctatgcctatacccaggccgcctatgtgaccacctccgatcccacccgctcacccttcccttctcaacacctggaagccccagaggacaagtccttcggcagttctctgatggagtctgaggtgaacctggatagatatcagactgccctggaggaggtgctgtcttggctgctctccgccgaggacaccctgcaggcacagggcgagatctccaacgatgtggaggtggtgaaggaccagttccacacacacgagggctatatgatggacctgactgcccatcagggcagagtgggcaatatcctgcagctgggttccaaactgataggcaccggaaagctgagcgaagacgaggagaccgaggtgcaggagcagatgaatctgctgaactcccggtgggagtgcctgcgagtcgccagcatggaaaagcagagcaacctgcaccgcgtgctcatggatctgcagaatcagaagctgaaggagctgaatgactggctgaccaagaccgaagagcgcaccaggaagatggaggaggagccactgggccccgatctggaggacctgaaaagacaggtgcagcagcataaagtgctgcaggaggacctggagcaggaacaagtgagagtgaattctctgacacacatggtggtggtggtggacgagagcagcggcgaccacgcaacagccgccctggaggagcagctgaaagtgctgggagaccggtgggccaacatttgccggtggaccgaggaccgctgggtgctgctgcaggacattctgctgaagtggcagcggctgaccgaagagcagtgcctgttctccgcctggctgagcgagaaggaggacgccgtgaataagatccacaccaccgggttcaaggaccagaatgagatgctgtccagcctgcagaagctggccgtgctgaaggccgatctggaaaagaagaagcagagcatgggaaagctgtatagcctgaagcaggacctgctgtctactctgaaaaacaagtcagtgacccagaagaccgaggcctggctggacaacttcgcccgctgctgggacaacctggtgcagaagctggaaaagagcaccgcccagatcagccaggcagtgactaccacacagccctccctgacacagactactgtgatggagaccgtgacaacagtgaccacaagggagcagatcctggtgaagcacgcccaggaagaactgccccctccaccccctcagaagaagagaactctggaaagactgcaggagctgcaggaggccactgacgagctggacctgaagctgcggcaggccgaggtgattaagggcagctggcagcctgtgggcgatctgctgatcgacagcctgcaggaccacctggagaaggtgaaagccctgcggggcgagatcgcccctctgaaggagaacgtcagccatgtgaatgacctggccagacagctgaccacactggggattcagctgtctccttacaatctgtcaaccctggaggacctgaacactcgctggaagctgctgcaggtggccgtggaggacagggtgcggcagctgcacgaagcccatcgcgactttgggcccgcctctcagcactttctgagcacctccgtgcagggaccctgggagcgggcaatcagcccaaacaaggtgccatactacatcaaccacgagacccagaccacctgttgggatcaccccaagatgacagagctgtaccagtctctggctgacctgaacaacgtgcggttctcagcctacaggaccgccatgaagctgcggagactgcagaaggccctgtgcctggatctgctgagcctctccgctgcttgtgacgccctggatcagcacaacctgaaacagaacgaccagccaatggacatcctgcagattattaattgcctgacaaccatctatgatcggctggaacaggagcacaataatctggtgaacgtgccactgtgcgtggacatgtgcctgaattggctgctgaacgtgtacgacacaggacggaccggcagaatcagagtgctgtcttttaagaccgggatcatcagcctgtgcaaagcccacctggaggacaagtaccggtatctgttcaaacaagtggcctccagcaccggcttttgcgaccagcgcaggctgggcctgctgctccacgactccatccagatccctagacagctgggcgaggtggcttcttttggcggatccaatatcgagcccagtgtgcggagctgttttcagtttgctaataataagcctgagatcgaggccgctctgttcctggactggatgagactggagccccagtccatggtgtggctgccagtgctgcacagggtcgccgccgcagagactgccaagcaccaggccaagtgcaacatctgcaaagaatgcccaatcattggctttagataccggagcctcaaacactttaactacgacatctgccagagctgcttcttctccggccgggtggccaagggccacaagatgcactaccccatggtggagtactgtaccccaaccacttccggcgaggacgtgagagatttcgccaaggtgctgaagaacaagttccggacaaagagatactttgcaaaacacccaagaatgggctacctgccagtgcagaccgtgctggagggggacaatatggagacagacacaatgtgatagattctcatacagctagataaccaaagaagatcagtcatacagctagataaccaaagaagacgcaggaataaaatatctttattttcattacatctgtgtgttggttttttgtgtgaggaacccctagtgatggagttggccactccctctctgcgcgctcgctcgctcactgaggccgggcgaccaaaggtcgcccgacgcccgggctttgcccgggcggcctcagtgagcgagcgagcgcgc

SEQ ID NO: 2439 - protein, 1192 aa, synthetic construct
MLWWEEVEDCYEREDVQKKTFTKWVNAQFSKFGKQHIENLFSDLQDGRRLLDLLEGLTGQKLPKEKGSTRVHALNNVNKALRVLQNNNVDLVNIGSTDIVDGNHKLTLGLIWNIILHWQVKNVMKNIMAGLQQTNSEKILLSWVRQSTRNYPQVNVINFTTSWSDGLALNALIHSHRPDLFDWNSVVCQQSATQRLEHAFNIARYQLGIEKLLDPEDVDTTYPDKKSILMYITSLFQVLPQQVSIEAIQEVEMLPRPPKVTKEEHFQLHHQMHYSQQITVSLAQGYERTSSPKPRFKSYAYTQAAYVTTSDPTRSPFPSQHLEAPEDKSFGSSLMESEVNLDRYQTALEEVLSWLLSAEDTLQAQGEISNDVEVVKDQFHTHEGYMMDLTAHQGRVGNILQLGSKLIGTGKLSEDEETEVQEQMNLLNSRWECLRVASMEKQSNLHRVLMDLQNQKLKELNDWLTKTEERTRKMEEEPLGPDLEDLKRQVQQHKVLQEDLEQEQVRVNSLTHMVVVVDESSGDHATAALEEQLKVLGDRWANICRWTEDRWVLLQDILLKWQRLTEEQCLFSAWLSEKEDAVNKIHTTGFKDQNEMLSSLQKLAVLKADLEKKKQSMGKLYSLKQDLLSTLKNKSVTQKTEAWLDNFARCWDNLVQKLEKSTAQISQAVTTTQPSLTQTTVMETVTTVTTREQILVKHAQEELPPPPPQKKRTLERLQELQEATDELDLKLRQAEVIKGSWQPVGDLLIDSLQDHLEKVKALRGEIAPLKENVSHVNDLARQLTTLGIQLSPYNLSTLEDLNTRWKLLQVAVEDRVRQLHEAHRDFGPASQHFLSTSVQGPWERAISPNKVPYYINHETQTTCWDHPKMTELYQSLADLNNVRFSAYRTAMKLRRLQKALCLDLLSLSAACDALDQHNLKQNDQPMDILQIINCLTTIYDRLEQEHNNLVNVPLCVDMCLNWLLNVYDTGRTGRIRVLSFKTGIISLCKAHLEDKYRYLFKQVASSTGFCDQRRLGLLLHDSIQIPRQLGEVASFGGSNIEPSVRSCFQFANNKPEIEAALFLDWMRLEPQSMVWLPVLHRVAAAETAKHQAKCNICKECPIIGFRYRSLKHFNYDICQSCFFSGRVAKGHKMHYPMVEYCTPTTSGEDVRDFAKVLKNKFRTKRYFAKHPRMGYLPVQTVLEGDNMETDTM

SEQ ID NO: 2440 - protein, 4 aa, synthetic construct
RGDR

SEQ ID NO: 2441 - protein, 7 aa, synthetic construct
  VARIANT 5: note = Any amino acid
  VARIANT 6: note = Any amino acid
RGDRXXL
